United States Patent Application Publication US 2021/0071252 A1 - sequence listing, part 2

SEQ ID NO: 602 - DNA, 3088 bp, Homo Sapiens
aaatccttaatcatgccaaaacgccattctcctgcctcagcctcccgagtagctgggactacaggcgcccgccaccacgcccagctaattttttctatttttagtagagacggggtttcaccgtgttagccaggatggtctcgatctcctgacctcgtgatctgcccgcctcggtaaataacaaacattggcgaagatgtggagaaactgaaacccttatgcactgctggtgagaatgtccaatggtacagctgctgggtgtatatcattttttcttacgtgcttcaaatagtaacatatctattccctcaccctatgacaaatctcaatacaatgctgatgtcaatctttagtcttctcctctccaggccaaacaatcctagttttctcatggcagtgtcttgatcattcactaccctaagtctcctctgggtgctttctaatttactcctaatgttctttctaaaatgctcacctaaattctgtataatctggacaacacatggtacagtagaactattttttgcccatgctcttactgctgtatattactcttactgctggatattaccataaaacctaacattgtattaggcttcaattagagttcacatcagagtgttgcttcatatatttaaaagcacagattttatagcaattaattaaatgaacataatttaaaagagttgctgttaactataaacttagaaaagtctatacataaaaatctttatgaagaaattcatcctcagataccgtataacagcagaatgtgttatatactattatgactgtaattcacagcatacatatactatgtggcattgatataattatggtcacagaaaaggtatatttgttaatacttattttatttggatataaaaacttaataaacatgtaaatgaattcaacctttaattgccaaacctggcattaaagaacttgatatgaaatgaacacataacttcagaaaagagatcttgagtactaaaaatccaatgtgaacacactttagatttaagcatttgaatgactgaattcatttcaattgacacttaccttgaacatttagcaccctttctacattaacatcagataatctcttttttcgaagttcagcacgtattctaaacacttgatcagcatatggagtcaccacaccaatactgccatcatctaacttcccccacgctactggccacttccttcttaactcttctacacgttccaccacttcaaacacctttaaaaacaaacacacacatacatattaaagttatcaccaatgtttggagaaaataatatcgtaactaaaactgatttataaaggatcccattttagcagatgtcatttaaaaaaaaaaaaaaactacccctaaatgggagtaatgctttgctgatgtgaactgaatgagaatataaatttttcatttacattttaaacagtaaaattctccaataatacaaccagtgaaaacatgaaaatcagggacaatgctattggcccccaagttcctgtgtagggaggaacaagctcaagttcctgtgtgggaaaaagacaggccatgattctagggaaggcaagttctcacagccccagtaattctcagtccactctctccagatcaggccaatgaaactaaccaaccaactagaagcttcctgtcatcagtgacatcactaagtcccagcagtacaaggtctaacattgtccccttcctcactgatataactaagcagaccagccaacagccaccaattgacaacaaaccacagctgggactaggccacatttggatcacagagaaagactttcagaattcactgcctgctagtggtacaagtccagccaagccatttcattaaccttgcaataaagcaatgccacagtttatgcaactgaatttttcagaccccaattactggattatgatagggtttttaggatagtttgttctattttaattcaatgaattgatcaaacagtttcaatgtctggcacagtggagaaggtacaaaagttaataaaacatgttccttgcccgctacttactgagaagaacttatggtttatttagaaaagagagtcataataaaaaaaatatataaggcaagcacaaatagagggtcagtcaagagtccaggggcatacagaggaaggaggtgtgttttcaaatgtctttaagtacatcgtttctttattatttactaacagtatctattttaatttataatattaaatatatttaataaaaattgacaattttcatcctttgaaaaacttgaggttactgactacgaagcagttcccatgtccagatacaaattcagtgaactacagaggtaaggactacagtcatcctatcgttattatgatacagcagcaagtgtatcacatacacagactacccagggaaggtgaagagcaaactggactaaagacatggcattctcactatcaggaaacagagtagacatactcagtctactgcaataaggaataagaaaaagttatctttacccatgtggttagatgtggggatagatgagttgggagacacctctgctgcgccctcccaccccacagagttcccacctctaagcaacacacaaccatttctgcactttatcctcctgtcatgtagtcaaaaaacagacttagaatgatgatatgagtcattctgggaaacctctctcccagaaaaacatcttctaagctggtcaaaattagcaaagacaatcattcaaagtctctaaagacagatcaaagaggttacaagaaattgagaagcatccatctattcaacaaaacctgtaaaaactcactgagaacagtggaaggttgaggcctacaagctatggactgccccctttcccccacagctcttacagaactgttttaacggccaaggggcaattcccatcgccctagctccctcctattccaggtacttttggcagctggtaaacattggcagatttcatttttcacagctttgtgctgcagaaggcctatgataagcagttggtagtagtcaggtggtacccaacccccatctcctgctacatagggagtgggacagtg

SEQ ID NO: 603 - DNA, 2339 bp, Homo Sapiens
gctgtcaataagacgtggacctgcgagccggggcaaaagggcttccggtctgcgggaaactggaggctagcggtgggcgtggaccgtcgaggtgactggcggttgtcggatctgctgttgtttgctgaccaggcagccgtaggtaatgacggatgcccagaccctgtgggcggagtaaaggaatcatgcactgatacacgcacactcaccgaggggcgcgtccgtctgcgtgcccctcatctcgtagccgaaaggagcgcgttccggggcaggcctccgggtacttcccgcagaggaccgggctttatactctttgctccttttcctcccctagtaagtcataacttattttgggagaagggcatagttatttgtctctcgtctccatgctacagcactttatgtgcttttcattcaaaatcgttcctcgaggacgaccaagtaatgtgatttgggggacagttttcataggaagggctttataagtttacaccaacataaagaaaacttaaaaaccttataaccgcttatttttcagaagtattatttttcatttaatctaaaaccatacttttagaacatgaaaccaagccaaacagatctttgcagattgtgcaagcgaacttttttttttgaatgaaagtggtgccatcaatgcaaaagcaagcccatataagtgccgaaaggtactcgtcataaggaggagttgcttccctattctgaatttttatttatttttatttatttatttatttgagacggagtctctctctgtcacccaggctggagtgcactggcatgatctcggctcactgcaacctctgcctcccgggttcaagtgattcttctgcctcagcctccccagtagctgggactacaggtacatgccaccatgtctgcctactttttgtatttttagtagagatggagtttcatcatattggccaggctggtctcaaactcctgacctcgtgattcgcccgcctcatcctcccaaagtgctgggattacaggcgtgagctgccccctgaatttgttttttttaagcaactctttttaaaaagagagaaaaaataatctctcttgagtgtattagttattgagctattccatttggaggtggcttaacccaaaacgtgtatggatgtggtaagattacaatggacttgaatgttctagatgaaatctgggccgagagtaattgcataatagttttccaaaggactgtcagatggtaaactcctttcatttactttgaactgataaacgataagatggatttttgttttttgacctttttatctacatttacttctgaaaattgaaaaagaatctgaattccaacaaaatgtttctaggcaagtatttgcatgatgcttctctaacatttcctatatcttagtgttttctctaatgttttctgtagctttcaaatttcactcctgtaagtttttacactaccagtaagaaagatctgggccaattatacagaatggacgatgatttttaaaagaatagagaaagcattcagaaaagagacaataatttgaaaatgttctgacatcatgtatttccttaaagcaatacaagtcctgtatgtccagttcatgtctactccaaccgagcttttttcagacacttagaaattgccttcaagaaaatccttatggaacattgtaacctagaggggcatttattttcgtttaaatatgtattaattgcaagtagtgacagaacctaaaaagcaaaaaccatatagcaccagttccaaggttcctatatctaatgcagttactcctactgcagtacaaggaggaatataaaatccctaggagaaatacaaaaggccattgtcttctttgaccagatttgaggaaagttttcatggaagatgtggtctttcagtgggcgttgagggtaaatatgcagatatggttagcctgtgcattctggtggaagctcagagttggaaaaacatgaaacagattgcagagtctggcatgtacaaagaggtatggtgagacatgtgagttctaaacatcaggctcatgaatttggactaaatttttgttatggaaacatggaaatcctaaattaattgatgccagaatataaattggttaagaacatcaagaaatcataacaactgagttattttgaagttggtgtaatgtggtcaatggaacgctggtgaatgatccttgaaacctggattgtattttagcactaagacagtatgcgtgtaatcacttgcaataaattcatttttttaggctttcttcttttcatctgtaaaatgagagattggtttagatgatttctgaggtcttttttatagg

SEQ ID NO: 604 - DNA, 1517 bp, Homo Sapiens
tcaggtgtatatataaaatgaaaagcaaaatgtaagtctaagacacagaaaattttggaaagctaactttgatttcaaattcaacttcctaaatatgatttgggatttccttagtgggtgaataagggcaggcaattaaggtccattctcttacttttcaagagcttcagttctggtagtggggtgcctcggaggcagatagcaaaagtgtatgcattaaaacaagttttgtgtaaaggatttgttagacaaaaaaccaaatatttgtgggtgagttcttaatactaaataaagatagttgtatattgttttaaacaaatttagatttgccttttagatataatcacatgcattactataaattattttttccttttaatatagtcaggaaaaatccacagcatttagcaacagcatacctttggataaaactgcttatagttatatgtttcgtttcagcatcagtgagaaaatatacattattatgccaccgtttaaaatgctggtgctcctttattttatatagtgttttattgcttcatatgtggaatattaaaatcaccttaacagctagccggatgagataatcacactccacgctacagctccctgactacagctaaaaactctgcataaaatacggcaggtttgaaggtctctgcaagggctctgaaaagtggataagaataagaggacttacacgaaagccagaaatagaggggagactgagcagtacatttcctggggttttaatttatattttgtatataccaacaggctccagatcagtctaagctgcagagctttgaataggaacacaccaaaaaagctccagaaaaattcacttcctctggccagaagatgggagtggggtaggggtggggaggctacagaaaagcctttagactcttggccatctccatccaagtgtcagcaaagaactagcagccctcccctccctctcatgggggtggcgttggggatggcagcctcagtggggtgaagtttttgttatcttttactcttgcccccctcagctagaaagacaatctcagaccctgaggggtgaagcccatggtaactgtcagtccagaatcctctacctagcaaaattaaatctctcagaaatagagcaaactgggaaaattatcaagtgaaaactaaacaaattcatcactagtaggtctacttaaaggaaatactaaaggaagttctttgagtggaagggaaatggttaaaagggggaaccagctggctgtggtggctcatgcctgtaatcccagcactttgggaggcagaggcagactgagcacttgaggtcaggggtttgagaccagcctggccaacatggcaaaatcctgtctctatcaaaaatacaagaagttagccaggcctggtggtgcacacctgtaatcccagctacttgagagtcttaggcaggagaattgctttaaccagggggacagaggttgctgtgaaccaagatcacaccactgtactccagcctggaagacaga

SEQ ID NO: 605 - DNA, 14910 bp, Homo Sapiens
acacctcggccggcgcagcgccccgagtagattacagcgcggcctttgtcgggcgggcctggctcccggccaggcgcccaaacaataaacaatcccccgggtgcgggcagggggtttcgccggccgcagccaggctctaggtgtgcgctggcgaatatctctatcaaccgcgaggagggaccgggccgggggcgcgggcgccgcggcgggcgctcttaccttccacccacagctcctccacgttggtctcgaggttcgctgcttttaatcccaccgcgaaggccccaaatatgaggaggcccacaaccaagaacttgccgcagtttttttgaatgtaacaacccagtttaaataagagtctctgaaacttcgctctcagccacagcggcgctttccggccagtagccttcccctggggacgaagcagaagggaggagtgagcgccggggagtcgcggcccgcgcgcccacgcccgcttgcgcgcacccgcccggtgagcccccaacagccgtgggggcgcgggtggccgcggcacacggactcgccctcgagactgcagccccggcggatctgagcgtcatggggggctcggtcataaagccgggccgcagcgtgggagctgcacctcggggacatcagggcgcccccacccgcgggatccctgagcgacttggggcactggggctgcaatacagaagaggaagccgaggtagagaggagagaaaccactcgacacagacaatattcaccccagagctgagaagggaggggctgcgtaatcccagcgatggagcccaaggttcaggagccagcaaaccagtcctgctctgtccatcaccctcggggacgggcgctaggggcgagcgctctttggaacaacatattgcgggttcccccaactggacccccgccgagaatggtagtaagtggggatccacgtggtgagcgcggccgccggagttcactcccgacgcatttccatagcgtggggagaggctgtgtgagctgaattaggaagtggggcagccagctgcaacttacgacaatatttgtgatcggaagagggcagccacatggatctttccctcctctcccttcctttctggttaaacgtaaaaaacagccgagtgcaaagggaagggctcaggccggcgcaggctgctccccggcgcggcatttccccggcgctggccgcggccccggcgggcccccgtctgggtgctcgccttccctggattccacacatttcagcgagcctcgtaaacacaatgaacccggcagctccgcagactcgcaccgcgaatttaaggtggcaatttgtttacaacttttcctcccccgaccaggccctaaggagaggcggctcaaaacctggaaaacgggggggatatctttttccgagaataattttttaagggagcagagatttcatgctcaacaaaaccaaaactggctgccaaaaaaggaaaccacctttatttcggctccctccccccttcctctctccgcctctctccactccgcctccccctccaagatgttaagaaatgtggcagccgtacaggagtttaggctgcaaataggggcaggggcgcaggaggaagaagttcagggcagggggcacggggcaggacagtgccgcggccgcccttgaggtggtccgccgtggacggctttccagtgctccggaaaaggcacaccagggagggcgtgtgtatacacacacacacacgcacacacacacacctccaccccctgcggacctcagacagccctttcctcccaggaccagagggagggtttgaatttttcaatccccatttgtctgctgcttttcctggagaggtgtgagtgagtgtgtgtgtgtgtgtgagagagagaggaagagagtgtgtgtgtttgtgtgtggcgggggcgatcccaaagagttagaggagggaagagaaagtgggaggagagagtctgaaatgcaccttggaaatctgctccagagcgaaggcggcgtcgcagtagctgggccggtgcagatagtcccggtccggcgcggcagcacggcgcagcccccccgtccgtctgcgcctcccgcctccagccggccgtcccggggcaccgatacagccgctgccgccgccgccgcggtcctggggctcggcggcgttaccagccgaggccatgttgccgccgccgccgccgccgccgcggggacggaggcttcccgggcggcccggcgcgctgctgccgctgctgcgggctcctggcgcgcctgggcgctcggcttgcgaggacgctgctggccgcaggctgctcgggctcgggctccggttgacagaccagccgctgctgctgctcacacggcgggcgctgctgccgctgcggccgcggccgctgccggggagtcagaccctgcgccttccattgccacattgcgcgggggtcccgaggtctctgcggccgccgctgcccacatccagttcgcggaagagcgagagccggcgcgccgagcgagcctgtccttcgggcgcttccgcggcactccttgcggtccccaactccccctacccgccccccgccccgcgccgcgaccccttcactgcagaaagagccagcgaatccccgctgctcccgccggccgcgctggctctctcggcgcctcccgggtcgcccgagcggccgcggagggcaagcgcagagccgccgccgccgcggggtccgagggtgcccggcgggtctcagcgctgccgggcccgggcagccgcagctgccgctgctcccgcggtggctgctgctggcggtggcggctccaggagctgctgctcgggctgctcgggctctggctgctgggttcgcggtggctgctcggtcccggactctgctttcttgtgctcctcggcaacccgctggaccattctgtccccgtgcagcgcgcctctctcgctcccgggacctggggactccgctctgtgtgtgtgcagcgggcagcggccgcagcagctccttgattcaatagatgagatggaagaagaaaaaaaagaactctctccatttggagaaagaagaggaggaggggaggggagggggtggagggggagagagcgagcgaaagagaaaaaggctggagctcccgcccccggggctgtcagatggcttgggtttctgcgacgcgattggctcgcggagggcagaaattactcagcaaacatgactattattagctgcttagcaacagctcaccaaagtagagagaccacccaggtaggcaacccagtgtgtgcatcctcggcttcggggcagcctctgagagcgccaaccttctcgcatgcaatacttccattaaggaatgctccccctcctttctctcttattccttttcttttcaacagtgtcttctttttgtgggatgcctttgcgcgcacacacgcgcgcgcacgcacacacacgaacatttgcctcgcggtagacacggggggaaatgtaatatttttttaagcgcttaaacaatttctgaaattcctcaaagaaaagcctttcagaggcaccttggcctcaagctgcagcaaatactgggaggtccggctcgcattcccaggcctgcaccaataatgacagcgtgctggatagtgcgccagtgtgtgccagatttttttttcctcttctcttttcttttataactaaagggaagacttaggctcttgcagggaacaacgcctcgcattaagataaacagaatggaaagttaaagaggaaagcaaggacgttgggaaaagccatctttcttaaaatccgtctgccccccagccgctttctccccccaacttaaaaaaaaaaaaaacacagtcttggtttgaaggagtcagtgttctataaacgtggaatccagacaccgaagcagtcttgtagaggcagaggcgtttttatttgaatctcgaatgtgacataagtaaaagagaaacaacagaatctttttttacaacttagagaaacggaattgtttccttgagagagtaaagttttcctgattattttgggttcatttgtacacccctttttattaaccagatgtttatatagtcagtatttttttttacaaaactcggtatgcatgttatatttaataatagtatgacgtaggagattataaatgccccgatgctggattcattgaaaacaaactgtgcgcggatcgcgaggattcgtcccgacaccgcgtccagtgtcaccaaggcatcccggggattcgcttcccgcggagggggaaaacacgcgaccctttgaggtggattctggagccagacacgtctacacaactaggctttttatttaaaaaaatttttgttttcggaaagtggaatgtgtttttcttacgtttccaagttattacgttcctccctgcggtaggaacccgacccgcaaacccttgatttgcttcactttatttttttttttaaacggggttgaactgcagagggactggcagtagcgagaagtctagtgaagtcgtgaaatggggcggtgtggctttaagatgcgcacggtgtatgttcattgaaaaaaaaagaagaaagaaaggaaaggaaagaaagaaacccagatggagggaaagggggaggagcagggagaaggcggagctccggtggccacgtgaccccgcgccaggaggcccggtgcgcgcgcgcgcccggctcccggactccccgcgcccgcgcggccggggcagagtaggtagggaggcggatgcgccgggccggctccgggcctccagcgcggtctcccgagagcccaggcgaggcgcgcgcccagccggcgcggacggacgtgccggacgcgccgtagtacattcctgaaggcggaccggcccccttacgctgcccaatgcccgcgccgcctccccgcgaccggccaatggtcgcgctcacgagtccctgcccattcagcggccccgcgctggctgcccgggcgcgctgggggctgcggcggggcgcgccggccaccggggcggtccacgcggctcccgcagggggcccgtccgccggctctccccgcccccttccttcctccccggcggtttcccctccccgcttccttccttcggcctgcgccttctccttcctccctcgccccgctccctccctcaatctcccctcccccaccagcctggccaccttccctccagcctctcctcctccccggcttcagggggaggcccttcccccgaccccctaacccgcaaaccgtatgcggtgccggggtcagggcgggatgtcccgaggaagagagggagacggggtggaggtgtttgggggcgttcgcgggatccggagggggacctgagcaccgggccagcgcggaaattcaaaactcagaccgcttaaggagcacgtgattttgtgagtgcctcagggaagggctgcggaaactcggaaagcaggcgggcagcatgcgaggaaaatgacactgagttgataaagagctcagacggctccacacattgccagtttcatctttgagtacgatcctgatgtttattaggtttgataaatagcacaaaacaggaaaagaggtttactattctagcttttcttactgaatggttatgccgacacttcaagtcgaaccattgtgtgtttgcttctggaaattgctttttaaaaactgggggaggggggtagtacccctagttttgcatgttagcctttttatatttcaagcttgctggagggcaaggaaccatatagccaaagacacgttgctatgtttgtcttttcaaacttctccaccacgttttggcccaaaactattagtgtttcgtctcaatcttttactagagggatttcagtatagcttgtttggaagaaggaattctggaaggaaatggtaagctgtgtgcccgtaatggatccgcctcactctccgcacgcggctgcatgtcctctggttccggcggctgccacatgcacgtcatttcagtggcaaagcctcttccactcaggcccatatcccttagtttgacttaattcctaaacgttttgaacattgatccccggagctttcagtgccctgagccccctcgcccgctgtttgatgggttaacttttcagcatctcagacaatggtcccggcctgtaaattctacccgtgggttccaggacgcactccggagcctcggctctaacgagcgctatcttaatctccccaccccccacccgccgcttcccctgtggtctgcttttttcatacttagagatgaattactttgaggatctaattggccttgtttctgtaacgttttaagaaagggaagaggagccagtgtaaaagcctgctcgacttgggtggtcagggctgaggctgcccccaatttgcctcattgctgatgcatgcgagtgcgacattcccagcgataatgttgttcctaatcaatctgcccttatttacatttgtaagcattgtcggctttaatatgcatgccctgtgcaggggactgctgtgccacaccgggtttgttaacttcaactaaccacaaggattccacagatctgagatgcagactggggcagccagacctgctaaggtgtcctccgggaagacagtccctttaaatggcccttctgcctctggcaccccttgtgacagttaccaaataaaaataagtgagaacttggggccttatcagccagcaggagttgccagcctttatgaagcaacagctgagtgttccatttcccctttccaagtaaagttcatctcaatgcataaattgtcattttggtctcccagtcatgatccaagacttctcattggagtgtgtagttttcaaagcagatgccttaagctctccggattccctcacatctcctcccttctctgttccaatactacaaatatccatggccacaccacacacatttcaaaaatgacatcagattatccaaatgatgacaatgaaataaaacatctgccctttgtgttgggatgttccaatggtaagcaattgtggaagccagacttggtggagttatgaaaaaccacagtgagatttaacttttcactggtttctcagatcaaaccaaatgagtctttaaaatccaatgtaatttggcaagttttgcagagtataaatgaataaaggggttaatgtattccagtaatttgaccctggggccatttataattttgtctactgagtttaatactcttccagaaatacaaggaattgcaaacatgattttaagtcctacagtatttttgttgagagggtcggatggagagaggaattggggatttgatgcaatattcttttactgcatggggagcccaggatacaggatgtgagtgatggtcaaggcagggcttcagcagttccaagcaggtaccttgaatatgagttgagtcgactcaactcaagccaatgtgccaccatccaccacattttcttggctccctaagaatgccttactattttctcattggcagcttttgtatattcttaaaaggtgatggtagaaaatgagtctaaaaggtttcagggaagtcggggacggggtggggggagattcagcagctacaaaatttaaaactactgggcttgactcccctcccctactcccttccaccttctgtttcctccccttatttaccccctccccaggctggaggaaagggaacagctctagccaacttgtcaaaataatgctgctaattacccctgatctcctttaatgggaagctgctcctaactccacaaaggagtaaatgaggggtctacagcacaaacccgggagcactggcattttttgagcttacagtgagctgggggtggggaaagcggcagaggggagtgtcctgagaaggtcccagaaatctccacattgattactccaggtctaaatactagcttgaaaggggaattagactttatgtattgccaaaagctattggtattctcttgctaagcatgtcaccaactgctgaatgttcagagcctactatgaacttgaaagaaaacagagcattgacccctgcattgatccctctctctccaaatatattcttacccacattgctttcctctcatggatagagatgtattcctacaacacccagactttgaacatgttttgcatccttccctctcctcgcctctccctgtctaatatatctctatcaagctttgcgtttgctaggaggcacaccattcatttcagtgatctctgctattgggtcctgcatgaaaaagaagctgagcaacatgatccctttgacccactgctggagcaacaaatttatcagaaatataggcatgagaaatgaaagggaagtaaaacaattccagcttattgtgtgtctttctttcatactgctaatccggtttacacatcacgcctacacgtctcaatagggcattatacactgtggcagaggctggagaaaataaaaggtgtgtgtgtgtgtgtgtgtgtgtgtgagagagagagaggaatgaggataaaaacgggagacatattttaatccacattgattaacctcatcagtttatctatctgtagaaagttgaagataattttgtaaaacagcctttttcttttcagaaaataattccaaatggttctaagttttgttcaaatagcttcaaagattatgactactttataaccagaaattagatacaccactcacagtgagtttgaaatgaagctaataccccaaattgagaatggcggggcctattgatgtctaccttgattcaacattttaattgaaacagatcatggactcaaaggcattttatagccttgtggaaggaagctgggtgacaactggaacacacataaactcacaatcgaaagccccttgttttacaacttgggcactccatgcacctgaggcaacaatttatccggagtaccacccagaaattttaagttgcaataacaaaggatgacaccataaagcattgtctttctttgtggaggcgattaattgcatgctgaactactgtcgccaataaacacagaaataaataaaaacctaaaagaaatgcacacacacagaatgctgaaaaaggactattgtggtagttcaagacctcagtgatccaattatcaaatatttagagccacccattgtggctctttattatttatgtctagttcttttgtatttctcctccccagggaggaagaaaggataaaaagggaggaagacggtcttctctcccaggtgcaggaaaacaggtctgtgggtgtcttccacagccgcccacccatatggttcttcttaggtgatggaaacagatcagtttccctgagagtgtgctcatccacacgctagcatcattttaaacatgaacgtactaaatacgtggagacacagcgcatgtcacccagaggcacagtttctgggggtcttggggttcagcgctgggcccgggcctgtaaagtgagaatcggtccggcccgcccccgggctcccctgaggccgcactctgcactctaagcactgggctggtcgcccatctctgtaagggtggcagccacccaagcgcctgaatcggtgggcataagagtcacacacaccacctctcttacccaccgccccttccagaactccaaaagcctctctggcccttttcccgcagcatgggaggggaggtgggtaaggtgcgtctcttctagcccgggtgtcccgcacccctaggcgtgcgtgcgggctcgagagcgggtctgcggggcgcgagcgtgcccttccctgcggctgcggctgctcccgcgagctggcggcagcggcttccgcgcgcgcgctctgagccccctcccctcggcgctgtcactctccgcaccagcccttccatcaccagctctgcctccgctggcgagtcagtagccaccaccaggctgatgagcggaagccaaggtggcgaccctttcaggcgtgaaaatgggagctccggcgaccccctccgtgagaattccccccggagccgttcctcagccggggcccgccgcggccagccccctccccgccacgcggggctggcctcgggggcgggggcccgggcgtgcgagcgagcgtggaggcgcgggacccgcgctcccgcgcccaggcggcgcagcccacccggctccacggccccggcgcgcggcccgcccctcctgcccggcgctcggggctcgctcctccgtccgccgcgcggggcgtcccgcgtccccgtgtccccgcgccgcccgaggagcacggcgcgcgaggcgaggtggcgtcggcggccgccgcgctggctgcactcaccatagccggccgtcaacccctgctcggagcgcgggtgccgatggcgcggacgctgggcttggatttcacatcaattccttttttttccctggcccccctttcctcgtcctccgctcctccgtcttctcccagtcttccctcgtctcccccttgccttgtcgctgcgggtctctttgtctcccctgtcgtctttttcttctcctccgttttcttcttcttcttctcctcctcctccgtctttacaaaaggaacggaaagtgtaaaaaccccggcgcgctgggccgccggaggctttcggcggagtgcagcgcggactcacaattacaagcctgtttctattaagcagttccatggccctcggcgtgggtggtctgccgcgccataggcaggacctgtcagggtcacgtgacggatccgaaaactttacccctttacaataaactcaaggaaagcaaagtaaactcgaggaacgtgctatcagcacagccctcctgggtaaacaggcgctcccctccccgccttcctgggaggcgccctgcccggcgagctcccgcgagcctagccaccctctccccgccccccgcggccgtgtttgcggggggccgccgggctgggggtctccgcgcgctcccgcggcttctccaccttgtgctcggctcccccgcccccgcacacattatttgctaacatttggccatcttgtcccaacgccggtcgggggaggtgtggggaagcaaggaagctccttttagcatcctcagcggtccgggaagtggggggttcccagaggactgcagaagaacaccacctttcatgcttgcattctcaaagcctttccttctcgcattcccacggaagcgcggaaaagctgggagccttctagatgacaggcctacgggccgccagaggggcggggagcaggaaaaccggacagatcacagcgccttcccggggaaatttcagcacgagatgtgtgcggattcgtgtcggtccctcggaagccgtttcttctgaaagagaccaaggtggcgtcccttggaaaccaagatttgtacctggtccgaagaatcacggattgacatttgctccctttctcttctgattcctgtggtttctggggtatgccacccaaatgctcccacctactgtgccgtcctgtgccaggcggccttgggtgactggcctaggagctggtgggtcgcgcggataaccctgctctcgctcaagactgaagcgttctattcgggagcgcccccgctacaatgtctgacattttatctgctcaaccccgccgctggtagacggtgtttcacacactgcgactttaaatgggccacattatgaataaagatgaattacagatacaagggcagggtagagggagtgagaacatttactgcagctctgaagagctgactagctggtcttgaaataaagccagactcttctcacttcattctgggctgacagtgtgattaggtgtgtgtgtgtgttgggggcggggggggcggggcgggggtagaagaggtgccccatgtgttattaaataataataatcatcctaggagttttgggatctccctcccacaaagatgacgtagccattcttgagcagagtcatttgagtttccagaatgtatgtgtttgagacacgttaagtaattaagcattagaaggggggcagccctgtgaatttggctggtccagaaggtcattttcataccagtgacttcagtcaaaaatggactcaaatgcatattggctgaccatggattctaaaagtcacaatagttgtaacaacaacaacaaaaaacccaacatttcccttcgaaacacttccccctgtcttttggtgtcatatcaaagggccctgtttatctataaatgtgagtggggttatgaacaggaaggtatacataatctccaaatagaggggtctagaatatgagggagaaagggggataagaaaaaagagaaacagccgacaaagggcatttaaatggcccacaatatacagttgctaggaaaattacagcagaacttgaggagtttgctttttctagttaaaatgaagaccctcatggaagcacacttggctacatgctcctgctgagttgtggccaaggctgatactcaagagtggacactagttttgtgtggcctaggacttaggcagctttcagagtgaacggggagtggggagcttctttagcaactcaaaactgcaaacacaaaattaagtacagggccttgaagtggcctgggcagggaggagccctaaagctacctgggcttctaggaaatcgcctttcttgagtgtgcagacaggaggacgacagaactacccagtctttgtggtcctggtggtctacgctgtcccttagttaggactgaatgtgttcatatgagtcttatcttagtccaaggctttacaattgggagcaaagacaagtttgttttgtacaagagtgtaagtacttagagttgggcaggagtggcataatgaggcagggagtagaaaatctggtgttaaaacgtacaagtataggaaggagggaagcccctggaaatgttctctcttgtagaatgtaaaaagttcctcttcaaagtttccccttcccttcttgttaaagaataaatcataagtgttaaaaataatagtttcttttaaaaactaacttccttcaagcctccttgctttgtgctaataactctttgttaagccctatcgtatgtagctgttaaacatgctcacaggcacatagtacattctatgtccttgtaccttaaccaagatatttatgctggacatgctcacaggcaagttccagctggcagcctatggcccttccctgtatggcacaagcaacttcctgttttcctttgtcttttcattacttttacctatttagaaaagttttaaactgttagccaatctggttttagtttagattgtgaggtctggctccagccaatggagacaggacacagtctcaggaacaaactatgtaagggataaaaattgcttccctcctttgttcaggtgtgctgtcacattgtttcatctctgatgagcaccctttctgcagaaagtaataatggccttgctgagagaattaaatttatgttcgagtgctgtttcttcgagtgctgtttctttgcagcaccagggaacaagcattctgtttctaaataaacattttccatgtaacgtctcccaaaagcaacctgtctttcttttccttcctttgaaatcaatcttcgcagattatgtcagtgctgtgcctctcttctctccactctcagatgctagaagcattaagtcaatgatataggttctggttgggggtcagggactcaacacccttatgtgttaccttctagtgcttctctgagactcccaccagggtgggccctctctcatcaaacagctgcctccacacttctaaagttgcttatgtctccccacttcccaaaaaccagctccagtgctgcccaatctaagtcaattggcatggaggtgttaatggcacacaaggctaccagacaacaccgctcagctccaagtcttcccagtctgataagccaattggcatccaggtgttaatggctgatgaggctactagacaatacttttgctggttaacttggacttttggagccatacacagaagaataattccaaagctgaagatttcagggcagggccagatggagatttagggggcattggaagacaggacaataggacttttgaaacaggcctgaaaccgactgaaaacagaccacaatgagtatgcataggcgaggttgtctttctgaatattgttgctactggagatacagtgttactctttgtttttgtttttgttttttgagatggagtctcactctgtcaccaggctggagtgcagtggcacaatcttggctcactgcaaccttcacctcccgggttcaagcaattctcatcctctcgagtaactgggattacaggcacacaccgccacaccagctaatttttgtatttttagtagagatgaggtttcaccatgttggccaggatggtcttgatctcctgaccttgtgatccgcccaccttggccttccaaagtgctggaatcacaggtctgagccactgtgcctggcccagtgttactcttgtaccatcaacatacacacttatacacacacttgcacatgcatacatgtgttcacacattcttcattttaagctcccctcttctctggctcccaataaaaatgggtgcctaagagtttccattcatctcctccctcacggtaacctccagcaattggaaggctttcaaatgagtaactgagggttcagaagaaacagttgcccacatttaaggagctctccacctcaagatgaatgctgctcttgcacatggtcagtggccataccacactggccacaccttaggcgtggtcagtctttgattctggatcagacagatcctcacaagctttcataaaagtactcttgctcaatgtggggatttcaattctaaaatgactgccccccctcactccctatcctggcctcttccttgtgggaggatattcacaagccaaatcaactctcagaattagggctttggggactgg

SEQ ID NO: 606 - DNA, 667 bp, Homo Sapiens
cttctgtctagcagaatatgaagaaatcccgtttccaacgaaggcctcaaggaggtctgaatatccacttgcagactttacaaacagagtgtttcctaactgctctatgaaaagaaaggttaaactctgtgagttgaacaaacacatcacaacgcagtttgtgggaatgattctgtctagttttgaaacgaagatatttccttttctgccattgaccttaaagcgcttgaaatctacacttgcaaattgcacaaatagagtgtttcaaatctgctctgtctaagggaacgttcaactctgtgagttgaatgcacacaacacaaggaagttactgggaattcttctgtctagccttacatgagaaaaaaccgtttccaaagaaggcctctaagtggtcaaaatatctacgtgcagactttacaaacagagtgtttccaaactgctgaatgaaaagaaaagttaaactctgagagttgaacgcacacatcacagagcagttactgagaatgattctgtctagtttttatacgaagatatttccttttctgcctttggccccaaagcgcttgaaatctccacttgcaaataccacaaaaacagtgtttcaaatctgctctctctaaatgaaagttcaactctgtcagttgaatacacacaacacaaggaa

SEQ ID NO: 607 - DNA, 1733 bp, Homo Sapiens
gtctcttcactctgctgattgtgtattttgctgttcagaagcttttcagtttgatacagcctcactcgctcattcagggcccccgagtagaatgggagagctccagatgcaactgactaactgaagatgtcacaaaggctgaatcttctatgctacactttggatcactagaaggaccagagtgtagtcaacgatgtgtaaacaactgagaaaaacttttctctggaaacaactgtgattttgaaattcagtggtttcttctttctagctgagaaacattgagcaagtcactgcaataacatggaatccagctgctttatctggtgaattaggataattcatagtgtacaactaggattacaattaatttatcagttaatattgctgcaaagaaaatcattctataagttaatggcttaaaacaacgattatttaatacactttttctctgtgggtaaaccgtgtggtttctctagtctgggttagttagtttgggcttggatgacttagaatgttctcagtcacacatctctggcctctgctggggtgtctgggaaagctgaactccttgttttcatgggctgtcactccgggagttagcttaaggttatacttatgatagaaaagttcccagaagcaaaagcgagtcagccttaatgtgcaagcacttcttagcaacctgcttccattagggttgctaaaatcccgtaggctgaagtaagtcataggaccaagcagaaatgaggtgggaaaataaactcattttcttcacaggagcagcctcaaaaagtttgtggtcacaaactcttcactttttttttttttttttttgcagtttccaacagggtagatttgagtattagtgaaaatgaatgcaaagtgtttgtcatgtagtaagaactaaatacattttataattgttaatgtgttttaccagccatactttttatcatcctatgatttaacaaacatgcattaagaaaatgtgtgggtaaggctgcttcaattataatcacttgagtcctttaaggttctgcttatgttatacaggatatagaaagtcatcccaacatactgactgtctcaaatgtattttgttttggatttcccaactatatcacagcctgttacgaacacttagttacataagtacattccatcttatgtcttcatttacttatttcatgacttaagttttataccaactcctccctagttagattttaatcccgttgagtaaaaagagggattatatttatctgacataattaggactacctagtacagcattggatctgaattttagattctaaacaagaatattaatatcaacttcccaactctattatatataccactgcattcaatatataccaatctagtacagttaacatcgtaggtagcattgtgacatgagccctcaaataggtagacaatcctgggattgagtactgggtctatgaatagctttgtgaccatggacaatagtaagcttctctgagcttgttttctgttatagcaagaagaaaaatatattttataatgataatgttaaaacaaaaatgtcttgctaatatggattggatttgtgtccctgcccaaatctcatgttgaattgtgatccccagttttagagaggtacctggtgggaagtgattgaaggggaacatcacactctggggtctgttgtggagtggggggaggtaaatgatgagttaatgggtgcagcacac

SEQ ID NO: 608 - DNA, 6939 bp, Homo Sapiens
aggtactaggcgtgccatgtgcaggctcttgcagcccagctgttgccctggcagctccatgaccacacctctgtgcccagacatggatcagaactgggagaaaaagagaaggtggtaccttctatccccttcaccctgggtctttcaggatctgccccaaggagcagaaaacgggtgcgcccagagcagcttactcaggagacgcttgctgatacagagatgagacagtgattcctgtcctcaaggaggttacattcgcatggggagagacacatagcaaaagagaccaccaaggcaagtccgccgagagatgatgagagcccagagggcatatcactaagagaaggccaggaatgatctcacggagcaaatggcaattggcttgagttttgaggaagtagaagtttggtcaacaggctcacccttgctgatgctgagtaatctgcaggctgcaatctgcccgtgaaagaactcttgcaacacattgtgtgaggatcccaggctgccctgtccttccctgggaatcaggtcaagagccctgctggcaggtgtcctagagcatgaatcaggcccctggcaaggagaaggcgggagatcttggctgagatcaggtaggaaggtttattggatgatgtgtctggtcaatagccaatctattaaccccccctgagagaattaggaaccttcatatgatgggtcatctctttgtgggagaagtttagataactggaaaccacattttggtcaagaatgactcagttaatttttccatgcctttagtgaggatttaattttgcacgggtaagtgacttcagagtggttggtgaaagctggctggctgtcattttgtctggcagtgcagagtggcaatttatccctttaggtggcccaagatttgggtggctggactttccaaggcaatttaatttaatttatttgtttatgctgagccttgggttaatgctttcaaatggtttatttcagagatctgataacctgcggactgactttctccttctagacttgtgttgatttgattcaacagaccctcatgactcatgaagcacctatatgtaccagtcattgtgataaatctggggattagacaggggcaaaactcagtccttgttgagttagctcatggtgcaatactggactcagacataaacaaacacacagaaatgataggtttgtgtggcatgctgaaggcccaggtaagaaggaattcattctgttggataaggcggggactcaaggaggcttcctggaggaagcgaaatcctagatgagtctgaaagggtaaataggaatgaatgctctccaactctgatggagttgatgatctcagggttggcctcttttcatactggttttgagtataaatgattaatttgtttgtaataattaataaaaagaagaagaatgcattcacaagcatcacaagtgaatccatccctgacttcttagtaatttccccttttacaccctgctaatatgatccctgttttttgccctttatgaagtggtccacagtgtgaaaaatttgaaaggccccaaagaatgaatagttcttcagtaaacgaattggaacagcatattgggcatggagtcaagatgttgacctatgtaattcttttgacttttttattttaaaattactatgattccttcagggcaagcactgctttaataattcatctttctgtcttcaaaagtcagcccagtgactgtcccttattccacagatgtggaaccaattcaggattgtccttgtgattctttttcctaagtggaatactgagcctccagcttgtgtgtcatatgtgtggacttttcagcatattcttctctggcccagaagtctggattcttcttgtctgttgcaataatataaagttattcagagctgtacatgaagagaagtcccacagggaccctgggatcagaagaactctgggaaatgcctggcccagccagtgctgttctaaagatcctcatcctcatggagataaccatttttaaggaagaaaagaggatctggaccctacccatctcagtctccatcagatcttatggatgctccaggaattggccatgattctcctcttttctaccatcttgtatgttgggctttgtagaggatagatgttttctagaagaatggcagataaggcaaggtctgcagcttgccattgatagtgtctttatcaacagatctgtgaggaattgtgcagctgagaggggagaagagaaatcagagagtggatggactgccacagttcaacatatactggtgctttcaatatagaatccacaaggcaacctgcatgctgggctctgtgctaggcactaggggtatatctatgagatgccaccccagctcccacagtcttacaatctaatggggaagagagatatgtcaatagacaaacgcagcagatggcaagtgctgggatatgaaacagtaagcagaagccacagtgttctctgggacttctgagctgagtcccaaagtaattagattaatccgtcatgggaggtggagtgggtagggggagctcctggaagcatgatcaaaagtggagagctaaggtgagggagaagaaagaaatgagattcagcaaagaggaggagagcaatgaagggccatgtatgaccaggcgaaggcaaattgttcggaccaaacatgacagtagggtgggtttttgaggggtatccactgcacttacagaggcaagattctctatggtgacctttcagtgagggtgggcaaatacactactttttgagtcagccatttttcactactgagcacctctggccttagcaagttctgagcatgaatactttcttctgtttctaagccattcaacaaatatcaaagtgctttcccatgtattggtcatcttaggcaaactgggtggacatgtagagcaagacgtaatgaggtaagcactcactagagctaggtcatcttagaaaagtcacttagcttcactgagcctcagtcttcctatctgtgaaatggggataatgacccttatgtcacctggtgggcaaggtctaaataaaatcattgtagttagatccatagtaggttctttctgacctaccactgtgcacctcacgccgttgctattccagtgggatatatccagtggggttacgggtatgacatttcggaaccccaccatcacttgtatcagcaggtctgtcctaggttccccaactaagcttcctggatgaggcacctagtggcgtcccctagtttgagtgtggggggtttggtaaactagtccttatgtatgcttgtcagatggagggtactgtctttaagatgggctcatagctgaatctggaaggtaagtgctccaggccagtattgttttctgcaggattcaaagttcccttgctatttctgctgactttgcttcccctctcgtgttctatatcccaaacctattatcttcaccagcgttaatttgcctccacaactctgtttttgcattttgaaatggaatttcccttaacctatattcctctggttcccaaactccacctgcttcagtttttttttcaatatcatctacatttccttcactagattatagccttagtcatttgtacccttagaatgaatatttttttctgtcatatctttgtttgaaccttttcacatttgacttcagacattacccatctccttcatctgaccactttcttcacttttctcatctttccattttggttgtatgtctactgagcaaggggctctgtgcagagcattcaaagatgactgagatgtagtcttgtgggtagagagagacaattagaatgcaccgtggagagtgttaggttgagggaagcggagattacaggagtccaaatgtcttatccgaggatatgggataggcttgagagaagatgctgagctcatgtaggtgaggtattgtcctacgtgaaggaaaagaggcaggagatggcagcttggaggctatattactttctctggggctgccataccaaagtaccacaaactgggtggcttaaaacatcaaaaatgtattttctcacagttctagaaggtagaagcccaaaatcaagatgttggccctacagctgtgctccttctgaaggctttggggtgaatgtgtttaatgcccttttcttagcttctgcccttttcttttctggccttcacagaaggccaaagagcaatccttggccttccttggcttgtggatgcatcgtttcagtctctgcctctgttttcacatggccctcttccctgtgtatctgtctctacgctgcttctcatcttataaggacacaagtcagattggaataaagcctattctaattcagtataatcacatcttaacttgattatgtatgcaaagaccatatttccaaataaggtcacattttcaggtcctcggggttagagctttcacatgtctttttgggggacatagttcaactcataatagaaacctcgcagataaatcattttggccggtgcacagagttaagtggtggattatcaagaatatggaattttagaattttagcttcttggttgatttttgggaattaacatacaggagagcaggtttagaagtaacaataacactttgagaggccgaggtgggcagatcatgaggtcaggagatcgagaccatcctggctaacatggtgaaaccccgtctccactaaaaatacaaaaattagccgggcatggtggcaggtgcctgtagtcccagctactcagaaggctgaggcagcagaatggcatgaacccgggaggcggaggttgcagtgagccgagatcgtgccactgcactccagctggggagacagagtgagactctgtctcataaaaaaaagaagtgacaataacaataacagaggctggtcttctgggaatgatgcgatactcttcagccagcctttctgttttgagcgaagccccaacctggagttcaaagagagtgagggcgcttcctgtcttcttgtctttctcctctctcctgctacttgttatgaaattcagaacaattagagattttctgtctcatccctggaatggtgtttctcctgctggccctatcaggctggtgtgttgatgttatcggggagaggctgtagttactaggatgaagaaggcaagagagaaatggaattcacgcagatcaaacatgtgtaatcagaagacattactgaggcttgatgatgctgttcagggtgtatttcccttgaaacgcttcttaaaagacagcagcttaaacaaatgggcaagatgagattcacagaggtaacatttcagagagaatgtaggtacagctaagcagagctaagcagtgacagaaggagaaagtgtgtctgaagaaaaatcttcattacagatttgaaagaaaaaaaacccatcaaatccctctgccttgtgggtctcacaggaggcaaactttctttacaaactgtgtgtttgtgttttgagtgactaagagttcagggacaagttcaaacacacctaagttcaatttaaaagtaaatgagatgacattggaggaaatttataataaaatgtcactctttacctaacaccattttctctggaattcaaaatatccattgtttaaaagtgacacagtaactaccatctagtttgctgaatgaccttctttatagcgtcatggtattagaaatggcttcagaaggaatcactcaactgcatttatctggcaggagaaaaatgcaggtagtatttattttggggtgtggtaggggatgtcccctagcaaggatcctagaagtcagtgtcaggtatgagaacaagaaacattcatttattgcatgcatactcattgagtccctactatgtattggtattatgtggcagtatgaatattctcatttgttaaataaagatacttgagtctgctttcagtgttgtgggttttgttattaagagtaatacagtcatgtgttgcttgatcatggggacttgttctgagaaatgtgttgtcaagcaattctgtctttgtgggaacctcgtagagagtagggtacttacaaaaacctagatgggatagcttaatacgcacctaggctgtagggtaaagcccattgctcccaggctacaaacctgtagagcatgttactgactgaatactgtaggcagttgtaacaaatcactaggcaacagaaactttgcagctctgttattatcttatggcaccactgttgtgtatgcagtctgttgaccaaaacatcatgtggttcatgatcgtacttatagtactaagtgccaggcattgaactgtgccaagtgtcagggctgaatgagctcattcaatttttctaataagtctatgaggtagttactgatatcgcccctgctttacagatgaggaaactgaggcacagagataaggaatttggataaatttttataacaggtaggagataagtgatgaagagacactgaatgattgaaaactcacttggtttgatttgcttatgtgaaaaatggatttaaggaaggcagcggatgcaagcacggaggcagggaaactggttgatgtgtggattgagtgagttaatgtgtgtcaaatgcctagaatggtcactacacaagtatttgctattgttcttatttttgttgtaatcagtcagaatggtctaagtcagtggtcagcaaactttttttatgcagagccagatagaaaataatttaggctttttatgctcttaggtctctcttgcaattactcaattctgcccttgtagcatgcaggcaaccatagtcaatgtgtaaataggaacgagcatggctgcattccattgcatgtagtttataaaactatagcccacagactatactttgccaattcttggtctagactatgctgtagttataattcccaaaccctattggtt

SEQ ID NO: 609 - DNA, 1587 bp, Homo Sapiens
accactgggccctgatccttcctttgtcttccaggccggagggactcgccggctgttggtgccgtatctgctcctgggaggggcagttgggtagggggagattgcctcttgcctctctctgctcaacccttttgcctctcccttaaccccgttgcttccaaagccacttcgggccccgttctacccctcagtcgtccggtctcctttcagtccattaaattccagggatgcttttactttggctgggacgaagagaaggaaggaaaagactgggaagaatgttgcgaaaatagaaatagtgggggtatacagcgacattcctaccagcctcatgaaaaggacgtggcctccatcagatggaggttgacagcaggcttgactgggtctcaggcccctgctcctcagggccacttgatcacccgcagcgtccactaggggggaaggtcttggtcatgtggcgtcaggaaatgccctagagggcctgctcacaggggcctgttggactaagcatgtcagttgtttgcacttactggacctgagttgcttagattccaaatttctcccgggaaaataagtataccgtcaactgatggaataggaaatgtagcattttttattttaattgtttatgctaaaatccagagtgctctatttcccattcctcattaacttgcatgtggttatttgccaaaatattaagccagtctcccatctagttttagaaatttcatagtatagctatcacaataagaaagatggataaacaaatagatcgtgtttgtgcttactctttcatattgtttattcgtgccaattgaggtttactgatcttagtatttaattttaattcatgtaccctgaattttgggcttctttcctaaaacacaagcaaaagaggcagagtataaattctccagaattagggggatgaaaattgatttttaaaaagctacaatttttatttatttttgcctaagctgttttaattcccacttagcttgtttgccacgcagctttatagtcattgaacaggttgactccttcagtttcatggttgtaaaattttatgtttagaggaaaatttaaatgagaaataatgtatatcacattatcatttctattaagccgtttgctaacacaataattaaaataatttctgcccagtagagaagttaccgaaactttttgtttagtgggcctcatttatgataactaagcagtatcatggaatgctgttttaaataacatcagctgtaactaagctgtaattaatcttcagacctatttagaattttgttttttgctttaaaatttatttcacattttatttttattgctttttgctttttttaatagaaaacccttaacagtgacgtatatgtatatatacacacatatataattttatgaaacttctttttatcaattacctaaatgttaaacgtggcataagcagaatacttactcttggtacatattcacatactttaatcagtttcttagttgtattttctccaataccagatactcgcatttttccaaagaatgcaatttttttcaatgtggcctttcttatttttaatttgt

SEQ ID NO: 610 - DNA, 4929 bp, Homo Sapiens
gacggggggcggggcgcgcggggtagcctgggccaagggcgcgcgggcgcggggagcgggggcggggcaggcgcggaccctccctccccaggacccgccagacgcccggggcccccaacggccagcacggtccgaatcgaccccaagcttgacccgagggcagcggggcctccgggaatgcctggccagggcggtgtcgccgggagtgaatgggggagggggcggccggggcaggacccgggtcagggccactctggtagtctcctgcccacccctccccaagccgagctcccggcctccctccctctcccccgtccagggctgaggactggggaagctgagtcccgggacgggtatgggggggttggggcttgggatgcagccggacctccgggaacagcagggggccctggagccaccaggagggagaaggccccgtccctgagccaggctcgcaggtaagacccgaggccgcaaaccccggctgcccccacccccagcccaggctctgatctggccccacactggcgttttgtggaggagaccctggaagccaggggagatgtcagccaagccgcgcagcacaggggcccaacttccactggcagaatgcaagcacccaagaggcaggagtttcacccaaaggcagggttcacccctgtgttcccagagattggacacatagctggtgttcagtaaacatttgcgggatgagtgaataaatgacggagcatttattaagagcatggctgtgcttggctctccatacagagatgagtaaggcaaggggcttcacagctcttggctgtgtgtgtgtccgtgtgtgtgcatgagtgtgcatgcatttgcctctgtgtgcctgtgtatctgcatatgtgcatgtctgtgttgtcagcacgcatgcatgtgcatgtgtccacgtgtttctgtgtgcatgtctgtgtgcccgtgtgtgcatgtatctgtgtgtgcatgtgcctgtgtctgtgtgcattgtctctgtgtgtgttcatgcgtgtgcatgtgtctgtctgtgcctgtgtgtatttgtgtatgtgtctatgtatgtctgtgtgtgtgttcacatgtgtgcatatctctgtgttcatctctgtttgttcatgtgtgcatgtgtctctatatctgtgtgcatctatgtgtctgtgtttgtgtgtccatgtgtgcatttgtctgtgtatctgtgtacgagtgtctgtgtgtctgtgtgtgcatgtctgtgtttgtgtgttcatatgtgcatgtttctatgtatatatgtctctgtgttcatgtgtgttcatgtctgtgcatgttcacatgtatgcatgtttctctccatgtgtctctgtgtgtgcatgtttctgtgtatgtatgtctgttcatgtgtgtggtctgtgcatgttcaaatgtgtgcatgtctgtgtgttcatatctgcatttgttcatgtgttcatgtgtctatgtgtgtgtttgtatgtatatctgtgtgtgcatgtgcctgtgtgtgtgtgtctgtgtatgcacatgtgtgtagggggatctggggggttctggctctgagcttagtactctattcttcaaatatccgtttcttggcatcgggcatgacagcctatccagcttggaggttttctgccccttggctgaggctgggcgagccgaacacccatttctcctttctttgttgagccattcttttcttcctcaggatgtttatcccaggaaatccagaggatcagaaccaggcaggacccggcactgggacggaggcagctgtctgcggggcgtttaccgtagatacgtatcacctgttctgagacagagcctgggaggctgtttttaatcatccgggaggttgtaaaatgtttcccgacgttacgaggacagctgctggaataatgatgcaggtagctggcacacacgcagtgcaaaggtttcaccagacatggtcttctatgcctatcacctggtcaatacgagcagcagccacgttaaggtgtaatacacactggcgtcatctaacgttccatgtgaggaaactgaggcacacaaagggcaactggcttgctcaaggtcgcgtgaatggcaaagcgtggatctgggattcaagcccagacaattgggctccagaattgactttattagtcatgatcactccagagaaaacatcaagcacttttcattacatgtttaatgaaaatgatgttaaagtggttttgtaggagaaaacatttcattcatgtaaatacattttactgcattctaaaatctagcaggaaaagatgtggcctaactaccgtcaagatctgggtacatttcattggaaatacaagcacattggacatgggaaaatactggggaactttacatggaagagaatgcatctgatagtctggcgcactagcatttgctggatttttaggacatatgggaggccgggtgcggtgacctcccccagcaatcccagcaattggggaggctgaggccggtggattgctcgagcccaggagtccaagactagcccgggcaatatggtaaaacctcatctctatgaaaaaaaatacaaaaaattagccgggtgtggtggtgcacagctgtagtctcagctacgtgggaggttgaggtgggagaatcacctgagcctggggaagtcaaggctgcagtgagccgagattgcaccactgcactccagcctgggtaacagagtgagaccctgtctcaacaaacaaaacacaaaaatatatatatgctgaatgctcagtgagctgtaacatgtgaggcagcccccaggggtgccgagatgaaccgctaagaaggcgtatgttcccacggggtgcagagatgaacccctgtctgagaaggcgcatgtacccatggggtgcagcgatgaacccctgtcttgagaagccgcatgtacccacgggggtgcagagatgaacctctgggaaggcgcatgtacccacagggtgcagagatgaacccctgtctgagaagacgcatgtacccacgggggtgcagagatgaacctctgggaaggcgcatgtacccacagggtgcagagatgaacccctgtctgagaagacgcatgtacccacgggggtgcagagatgaacctctgggaaggcgcatgtacccacagggtgcagagatgaacccctgtctgagaaggtgcatgtacccacggggtgcagagatgaacccgtctgagaaggcacatgtacccacggggtgcagagatgaacccctgagaaggcgcatgtacccacggggtgcagagatgaacccaactgagaaggagcatgtacccacggggtgcagagatgaacctgtctgagaaggcgcacacacccacagctgcccctcatcttagcaccacagtgccagccccaccctgtctttgataagccctggccttccagggcctccctcagagaaccagcccctgcggagtccctgaacgtagctgcggtctggggtgccgaccctcggcactgggagaaaccctcaccagtagcatcaccccccagtgagccaagatcgcaccacggcagcatcactggggagggagtcacgtggttgtcactgcagaactctggagaggcaggctcttgcgtgggtgggggccatggaggacgcagcgtgggatttaaaatgagcccagtgaagggaaatgctggttcttcaatgtccatgagctcaagccctgtgggaggtgtagcctcgattattttgcacagatctgaacagcattcacccccagttggatatggccctttcctcgaagcacagattggaactcaaggtcactgaagtgctttctggccgcatcatggagagaaaggcattttctcactcaggcatcaccccgggaacgtggcgtgccatgttttagcatctaagtgtgtcccccgaggaggcagggttatgccgtaatcacaagcaaaccccaaacctcaacggcataaacgacacagggtaatttatcatgggattgcgtgtccacctgggtccccgcggagctctgttgactggagtcgctcggagcccccggcgcgaatgctggatggctgggcggggaggagcgctcaggggcttcacgctgtcaacaccccactccgaagtgactcccgctgcttccagcagtcacctgctggacagagaccgtcacacgggccccttcacgcagtggggtgggaagggagatcctaccgcgtacctggaagacgggagaacaggggtgtttcgatcagtccttgtagcacggccgggacttaagctctgaaccaccagtgaggaggtcgttggtctgagcctgcttttccaagtcctatcttcccttcttgggttcagacagcagatccgactgtaagtggctttaaagagacagcagacatgtttgtggcagtttattcattgcccctggatgccacccttgcatgccccctatgtgacagctagcggcccacagcccattaaccctgcagatgggcacagcaggcctcagggaggtgatgtgggttcagtgtgccgaagatgaagagatgcaggggactcaaacccactggccgaggcaccacccgtttctccaggcaaagaggtgagtcccaaccagtgaagagaagggagaagtggtgccagggcgagaacgtgtgtgtgcctgtgtgtgtgcctgtgtgtgcttgtgtgtgtgtgcatgtgtgtgtgcacatgagcttctgtatgtctgcagctgcacatgtacatatatgtgcatgtgtgcatgtgtgcctgagtatgtgtgcatgtgcacctttgtgtgcctcagtatgtacacgtgtgtgcatgcatgcatgtgcattgtgcttgtgtgtgtgcatgagcctgtctctgcctgcacatgtgcgcctaagcatgtacccgtgtgtgcatgcatgtgtgtgcatgtctttg

SEQ ID NO: 611 - DNA, 1774 bp, Homo Sapiens
aaggaggaaatagctaacgctctttagtgggatccatgagaggttttgggtccagtaagacattggaagtccatgtttgcaaaggatcagggtattatgaggcatgtgaggctgaggggacagctgaccagggaacacaggcacgaacacccaggcatgtttaatggacctcagaatgtggtgtaacagagttggttaagagccaaaactcttcaatcaatcccatagacaggaattcaaatctgaccctgcaacatacttcctgtgtgatcttggccaagttactggacttctttgagcctcagtgtcctcatctgtacaatgggcatgataatagtacttgcttgtggagatgctctgagatgcctgagaggcatgtaatattatcccagtgcctgccctgtggtttggggacttacatgtcagttcgtggtgtagactgagaagctgaaaatgggacccaaaggcacattgtaaagcccatggaattgtattaaggagtttggactctatcctcttgctcagtgactttcaaatcttgacagtacataacggggttaaaggtctgaacagctcgtgtgccctgaccagttcagatctcttccggccactgctttccttcttcccaaacccctcccccaactactttatggattaagcataaaaatgcctatgggcatccacgtcctgaatctgactccttgtagtgctgagcacagatttttaggaagagagaccaggcaccccttatagaaagagctttttgatcaagagccatcaggcagcgcgtggagggcctcacctagttcttcctcctgggcttgggcatgctctcctccctgcttgcctctgctgaggactgtatttccttgaattctgcctacctactcccagcggggctacaggcgattgtctgcaccagtcctcacaggagggtgctccctgccttttggcagtcagtgctatttctctgagctaggtagcctgctctaaatcttactaggtttacaaagagaatcctccatcccacctgagaactggttatcagtagtgccatcctgctcaaatatcttcaaatacacaccaccatccatgtgtgggttgattaaggagctgacgttcattagatctgcagtctcctgacctgatgtgcatcagaatcactgggagaacaaacaaacaaaaatgaatccaaaacaagcaacgaacagacagattctcaagtcttgccaagtccaaagattgatttggtggagaaattgtactttgaaagctgcccagtttacttggcagacatctcagagtttctttctggtatctctctcaggatatagaccccaataaaacatatggcctcacacagcagcggcctcaccaggtcgcagacacatgtttagaattcctcagtctactgtgaggctggcaaagaaagccccaagcaagaaaagcagacactgggcacttttgaacttattctgggtattaaaggagcattacatgagaaagagtatgtgcaaacagcggccagcaatttcatctgacttgagagatccttgtcacaggagggagtgggtacatagctatgtgtgcagcccatgcatttcggaggtattttctaggcaaactgcatgaagtcttacatgtgtacctgctgtcctcatgtgcagaataaagccttctgtaaaagacagcagaccggagttgcatctgtgtctagggcatctgtgccttccaccaggtggagaagttcacagcagtttggattttttctgcc

SEQ ID NO: 612 - DNA, 1012 bp, Homo Sapiens
aatttttttatcatgtatctgtcacttacattagtaaatctgtaagagtactgttttaagtattataataactcactttattgcagagttaactgggatgagaaaatctacttttcgtttaacataatatatatttaacaaaaattacctgattgactttatactaaccggtgtttataagaaacatgaggaaacactacaccaaaaagggccacagaagcatcaatgactgagactccgagagggaggggaccaggtactgcttctccagcaggtatgcgtaaataaatagaggaaggatcatgctccagagccccacttccagaggcactgtttggctggagctgcaaaagagtgaaataaaaattattcaaaatctactttaggaaatctacttattaaacattgggaatgaggattacagcagaggagaaaggagaaaaggcaacaaaaaaagaatgattggatccgaacatttgaaaacagaccaaaatgtaatttggtcattaaaaaatcatcagtaacaccttatacaaattttaagaaaagctttattcattcgaaaacatatttacaccacccaccttattgcgtgaacaatatacacaagatcttaatcccacaattattttaaatggggctttaatcactctttaaaaagtacataagaaataatgtattcagtgggcaaaagttctaaatcttcaacctactaactcattcctctccaacctgtcacaaaacaaaacaaactaaaacaaaacaaaataccaataaccaaaaagccagttaaaactgatctttatcacagccaccacaaggtatctaaatacacagaatattaaataaagacaatttgccaaattctcactcttcctgtttaacttttttcactatctaccaccaggatgccatctttaagtgtctaagaacactaaatggggattaaacctttctatacactattttctttttaagtgacaatgtgtaataggaccattgtttcagatta

SEQ ID NO: 613 - DNA, 1743 bp, Homo Sapiens
tatttttatttgtctttctttttcaaacaccaacttgaaccagaaggaagagtttaagaaagtgaatggagaggccaggcgcagtggctcatgcctgtaatcccagcactttgggaggctgaggtgggcggatcgcttgaggtcacgagttcgagaccagcctggccaacatggtgaaatctgtctttactaaaaatacaaaaattagctgggcatgatggcgtgtgcctgtaatcccagctacttgggaggctgaggctggagaattggttgaacccaggaggttcaattgtgccactgcactccagcctgggcgatagagcaagactcagtctcaaaaaaaaaaaaaaaaaaaaaaaaaaaaaaaagagggtgaatggagagagagatatcattctggaatggtaaacaggggccagatcacgaatgactttgtaagccataaaggcctgagagaggaatgtgaaagaggaactaataataacatcaggcactgcagggcgctttgccaatcactctttttttttttttttgagtcagggtctccttctgtggcccagtctggaatgttagtggtgcaatctcgactcactgcaacctccgcctcccggattcaagtgattctcctgcctcagcctcccaagtagctgggattacacgtacgcaccaccatgcccggcaaatttttgtatttttagtagagatagggtttcaacatattggccaggctggtctcaaactcgtgacctcaagtgatctgcccgcctcagcctcccaaaatgctgggattataggcgtgaaccatcacaccgggccattccaatcactcttcatttcctgcatctcaaagcaacgctgtcaaacagttggagttgattttctaggcctttctgttttccccctcctgcttgccattgcagggcctcctctggtcactcgtaccagtgagagatcaggctcctttaggaagtactcacagcggaaaatcagcttgaaactgcctttggaaaagtatgactgagacagtgaaggagatcaaacttaactgactccctcttgctcctaacctccagactgtccttattcattcctgggtgtaggccgaactaactttgggagaaacttagtttatagtttaaacaaagacggtaacaaccctttcttaaagcagacctccttcttgcctggggactagattgcctttgtaggatgaacattaaccacaagattagaaattatggtttaggagtcatgcagctggagctacaagattccaaccctcccctaaactgctcctaagatcagtgcttctttcccaagcggctgccgaagatggcggaggtacaggtcctggtgcttgatggtcgaggccatctcctgggccacctggcggccatcgtggctaaacaggtactgctgggccggaaggtggtggttgtatgctgtgaaggcatcaacatttctggcaatttctacagaaacaagttgaagtacctggctttcctccgcaagcggatgaacagcaacccttcccgaggcccctaccccctccaggcccccagccgcatcttctggcagaccatgcgaggtatgccgccccacaagaccaagccaggccaggccgctctggactgcctcaaggtgtttgacggcatcccaccgccctacgacaagaaaaagcggatggtggttcctgctgccctcaaggttgtgcgtctgaagcctgcaagaaagtttgcctat

SEQ ID NO: 614 - DNA, 1349 bp, Homo Sapiens
tatcacactctggggactgtggtggggtaggaggaggggggagggatagcattgggagatatacctaatgctagatgacacattagtgggtgcagcgcaccagcatggcacatgtatacatatgtaactaacctgcacaatgtgcacatgtaccctaaaacttagagtataataaaaaaaaaaaaagaaagaaaaagaaacttcacatggggccacatgtctaataaaggtgactgaatcccaaaattatattggtaacatggaaattcctgataggggaagaatattcccagaagtgtgaccagttagggccaaaataaaaggtacaatttacccaattattatacctaagtacccggccttattaaatatatgttcctcaatatcaaattgtactaaaaatcaggaaactaagctcctagtagagaactggtcaaagggaagatctttgtggagtcagcagtttcctctgtcctacaatttggcaaaataatctcataagcacaagaaggttaatatgcttgcattaaaaatgttaagttacttataatccaatttaaatgtaagttcaaataccttaacatgttcacattacttttttaattcacaaaaacgttcttatctatctttattttaagatgttttccacatacatgcttagtgaattttcttttaggagatgtaagagagtctacaaatctttattctactatttcccaaaatatacccaattactggcaaaaaatgttattattaaactgatgagaaaatataaaggtttattactggattaaataagtttttccatatgcttgaattttttatacacacagtatatactctattatatgtatacacagaatacaactctatcagtattgaacttagtttgtcattccataaaatggccatagatggccagatcaagtaatcctactcattttaccctgtattactgaaaataaaaatggggggggggcaaataaagactttaatatctttaatgatgttttttaagggttagacttttattttctgacatttttctacacctctaatgaaatacatttcacatatcgtaaaacttacccatttaaagaatccagttcagtgtcttttggtgatttattcagagttttgcaaccattaccacaatctaattttagaatagtctcatcaccccatacccatcagcagtcattccctcctcctccccacccaacgttcgtgacaaacactaatcttctttccctctctatgcatttgtctatgcttaactatttcacataaatagaatcattacaatatgtgatctcttgtgactggtttcttccgcttagaatgttttc

SEQ ID NO: 615 - DNA, 1585 bp, Homo Sapiens
acattttgctctctttaggaaaagacaacattgattttagaggtttttgttatggaggccagggggatttttccagtgcagcacagagaaatctgggtttggattgggaagccagacatttcttggcttacatttcctacttgaatgggattcgtttgccccctcctcacctctccccaacccccaggcagctagaagccccacctccttgcttggaccatatggggaagctggctcggtggctgttattctactgactccaagttcacgcagctgttcatcccctgcttaatgtactggttgcctgtgtctgtaccccgtttcatcttcacttctgggaaccaggctgatggagaagtcttctagcagaagtactatgggtcatgatggcagaaagaagagcaaacttggtggaccatgtgctggcccttgatgggtctactcagatgggtcacgtatctctgctcacaaggtagctacccttgcatttcatcagggctctgcttgcaagaatcgcaaggcagatcaagcctagcggcctaagattgaataactgaggcttgatagagttacatcacttgtccaaagagataatgccagtgaatggaatagccagatcgaattccagaatccgtaaagctccactgcttctctctgaatgtaataacccatccacaagccctaagatattagacacatcagtgatcactccatctgcttttggcccattgctgttgtcaggatttatgcatttatgtctgcaataattatttattgaggaccttctctcttgcaattgcatatggccttataactgaattctgactttatgtctctcttaggatagacagataaaaatttttcatatgtgatcttctttctgtcccctacctctcagctatgagcctgaaacagcagattcagtagaacagagtttctcaggaatggcagagccacaagttgggaggagcccagctctgtccaacaacctggaacatccatcaaccaggaaaactgttgcactttatgtgattaagaaacattttttaaggaaaaaagcagtaaatttttgggttatatttgttgcaatagctgtgttactttcctaatgcacaatcacaaatgtaaaatgccacacacagagtgtgaggaaatatattgctattggactacttgtagtctatttaatttttttatatagctatagccagatctggggtgaaatggtttagaataataatttccaatagtatacatcatacctttaaaaagacttttatggatggataaatatctaattatggaactgccctgcaacgtaagtggtgagagaaactctttatatatgctttgtttttttctgaatgcataggttcagaattattaaacaaatcctcatcttttgacagccagtaatcaatttctcatttgcagggaatctaattgcattagaggggacactggggaagttatggactacctcatctttctactataaaaaatgaaactacttgtctgtattgaatttgattttatatgttcaatgaaatatatcatatccttataataaagttatataagttgc

SEQ ID NO: 616 - DNA, 2548 bp, Homo Sapiens
acagcatctctctctagcctattatctcctgttagacacagcccagaaaatgaatagagacaagtcctggctgggtctgggttcagaaacataatagaaggattcatctaattagcaattgaacccttgacagtacccgaaatgaaagccctagtgggtcagcactcactgtttaccagctccaatccctgctgtgcacttgcctttctaacagctccccaaggactgggctccctagagtcctcagtcccatggtcctggaaacctggccctacctctatctatgatttttgattatcagctccagcatttatggatcccttctcctattatctaatctacgggctctaaagattaaactgtgcactttggactatttaaatagttcttaaccactgatctcctccctcagggaagggaattctttccacagttgctagttcctcacacctctgcctctatgggattctcctggtccccacatgctctgctgtgtcttctagctgtcggccactgtggaggaagtgaaccttctagatcctgctgactcatacaatgagttttgtgtggaccatcagacaaaagggctggctggtgaaggtggctgttgtctggaaattcctcccagctctcctctaattatgtcataaggactggaggccccttagcctgcttgtgtgagtatcaccagctatgtaaagttggggccttagctcatcctcagcacatggctcaggatcacttccttaagaaagtctcttctgacctccttacccctaccatgtttcttgtactgacttacgcaatggtcacaaccaacatagaagctgaaatcccaatgactcactgtcccagctgcgcttgtagataagggagaggcaaagcacttagaatggcaatcagacatggctatctgggaccaggaattaggaactgctgacacaaagaagcagggacagaagagaactcactcttgtggtgagcagaggcagctgtgcaaacaacctgctgttccggatgtgactgtggtggccgtggggtgcagagtccagggctcatggcgttggtcatgcaaattgtggttcctgggccttagcagaaacaaggaacctattcagtggcattgctttgggggctgctctggcttcgtaagctgtgtgcctgattcttaagcccctcccagcaattctgggactgaagtttggtgtgttgctcttcggtttagatctgccacagtcatttgctgttgcttgaagctaaaaactctgagtgatacgaacctctcacacaactcttaccacgttgtcactacctaccccagtatatttagattccatcagatcaagtactggattttatttatctctaaatatcctaaatctccacagtgcctggagtacatgtatatatatttgacctacattaaactggtcaataaaatgaggaagtcttgcttaaagttccttctaacttaaaatttgcctgaccacatggaagctgtcaggttgctcattaatgcagaggtaatttttttctcttaactagggttagaatttagactctaccccttctctgtatctcagagggagcagaactagtggtttcctacactggagagggaactcaagtccttcagtgacctatgtcgtatgttaaagtcactcatgtttggcccctgtagtacaaatataccagaaagagtgataggaaacagcatattccccccttgttcagatttttcttagtatgacattatcttggaaagagaaaggccacatttgcaagtttggaagaaagttccccctggagttttttctctgtcctatttcagtatgtattgactctcagaacccgggctgctatgacatccgttttctgggtcactttgtccctgagtcattatcatcctgtaactttctgaaaacatttgactatgccatttaccagttaatttcagtgaatagctgaaatcatagtaaaatgttagggccagagtaaatttaggtcagattgattttattgccccagattaagaaagtgagccaagttgttgttaacaatttcatagtttccttcatcacatcttttcggagccttactcaaccataagatgaatcatccataaaatgacccccacaaagctgtggtttacatgttcatcactcttttctgtcatttgttgctttcaggataacacgcaaggaaatatgggccaactcttcacatgaacacaagatatttccatgctagccttttgcaagtaacaacagagagagctctgtgcagttttcactggaatgcctgtggattgcttgtgtcataactgtaatctaaagagttgtccatttgttgattcctttgtatttgtattggtagaattgccactatcaaaccaagatctttagctgcctttgtatcaacttctttggagcttatgtgattttccagaaaatttccaaggcatagttttgtccctaagtcccatgaatatgtaatattttgtgtctctctattaaaatagcactttttgtgcattccattaacaaat

SEQ ID NO: 617 - DNA, 2438 bp, Homo Sapiens
cggtcgcttccgaactcgctgcactggaggacgcaaggttcggtcctgcctgatttcgttgcgtgcggagaccgccgtcgcggctcagaaccggagcgtgggctagtctgaacactaccctgactctcacctgggctttggccctgcgaaatcagacggggagagtgctgcttctatcgatggcagcagggccgacgggcccaccgcaaagaacacagggatgagcgtcaaggatgggagaaggggagatccagagaacctgacgcgggccctaattgatagtgttcttttctttagtagctgtagctaggattctgtgtcttcggtgccagaggggcccgcttcccttccctgaactcttccagcgtcgggaagtccctgataccaggcgccaggggtccaaatgttttatgccaatactgtaaaacctcaagtgtttggacacctgctttattcttttcttcaccgaaatcgtgtatttcacgaattcattcaaaaacctttatcaggccttggagatgttaaaagaatttacagcctagtggaagacacagattcctaattagtccaaatttactcctaacacctgcaatcatcctacaagatcttaatgtttatgtgcctcatttatctaaaaccctgaactttggctgcctgtgaatcctcaggtccatttcagcaacccacttttgcatgctgtacctttgatatcatctgaaactgcttacattgtctccggtatcagaatctaacagtatatgctgatctccacgttctagcaaattttgtttaccagcaataataggagcaacctgctctcgagagtccatattctgatccctaaatgtattagagccacagtggggcctggaacactgccttaacacctgggctaagtcctcttatatctcgtagtgaacaccttatgtatgtaaggtgtccccagcccccgggccacaaacgggtaccagcccatggcctgttaggaaccgggctacacagcaagaagtgaatctctggcaagccagggaagcttaatctgtatttacagctgctccccatggttcacattatcgtctgagctccacctcctgtcagatcagctgtggcatgagattctcataggagctggaactactgtgaactaggcatgagagggatctaggttatgctccttatgagaatctaatgcctgatgatctgtcactgtctcccatcacccccagatgggaccatctagttgcaggaaaataagctcagggctcccaccgattctacattatggtgagttgtgtaattgtttcattatatattacaatgcaataataatagaaataaagggcacaataaatataatgcacttgaatcgtccaaaaccatccttccccatccacctagcccccacccccaggaaaaaattgtcttccatgaaacaggtccctggcacccaaaagattggggaccactgccttatatagttactgagagttttttctgggcttttttgttttgttttgttttgtttttcaggagtacttaactctcagccgggtacagtggctcatatctgtaatcccagcactttaggaggccgaggcggacagatcatttgaggtcaggagttcgagaccagcctggccatcgtggtgaaacccggtctccactaaaaatacaaaaattagctgggtctggtggtacatgcctgtaatccaagctaatcgggagattgaggcaggagaattgcttgaacccaggaggcggaggctgcagtgagctgaggtcgtgccactaccctccaacctgggagacagagtgagactccatctcaaaataaaaataaaaagagtacttaactctcaactgacggaagttcaataggccttcaactgctttcagctccagatgcccaatatacatcttccccccaattttcacaattttgcatcaaagtttgtcaattttatatgtatacatatatatgcatatatctgtgtttgtacatatatgtgggccctatcaaagccaactattctaaataataaataaaaaggatccaagatatcacttagagaaagacatcagaagagtgctaattatgtgaaaagggatagctttgccaggacacaaaaaaggagacagggttgaaacccttcatcacatgtaacacaatgttgttaaaacattaaacctcctcacagccacattctgcttcaggtctctgcaaattaacattctttcagtcggaaagagcagtctttctgactgctcttaaacctagaaattactcaattcttcagctcctctgggtggcacaaatttggatgcaaatcaccttttgtagtctcaggctttggcccacttctcagaattctgcaccaatccagctgaagcacacggcctgcccccgttttctgttagtaatttgaactcatttccta

SEQ ID NO: 618 - DNA, 5963 bp, Homo Sapiens
gaaccggcagtgagtggggccctagaattcccaagagtatatggcctttgtgttcagttaccagggtgggtagggaaggaccatcaggtgggggcggggctaggcggggctaggcgtggccgacctcacactctccttgggcaggacctgctgcagctgctctcggggttggaggggaggttcctaggtcaatggagttgtgtacctaggaggattatggctgcctctgctgagtcatgcagattgtcaggaagtgtgagaaagccagcagtcaccggcctcacccagccaccctgccgccattaacagcactaggcaggcagtgcgcagagctgagaacttgccccaggttacccgcctcccagctgctaaacaaaagggaggcttttcagctggttcaaattgttacaaagttcagctagagatttgcttttacctgcggcgttttccccataccactggctgccctcccgaagaattcctgtgatgccaggcaggaatggcctggttggagaccagctagctcccagggcctttcccgctgcttcctctacccctgtatttcgctgggctctctaaatggattcagctccagccttcaacattttaaaacaagaaactaggaaaggagtgaaggaatctgcctcacagattgtaaggacttgaaaacccaccgatagaccaagaggaggaaaaccttgagaccctgagactttcagaaacttattcacagttaccaaagctggcacacggatggagctgaaggccattatccttagcaaaccaacacaggaacagagaaccaaataccgcatgttctcacttatacgtggcagctaaatgatgagaacacatgaacacatagaggaaaacaacacacactgggaccttttggaggatggaggatgtgagaagggagaggatcaggaaaaataactccgacgggtactaggcttactatctgggtaatgaaataatctgtataacaagtttacatatgtaaccaacctgcacttgtgccccagaaagaaaatgtttgtggcagggagtgggacatccggcttcagagcaggaactttcattgcaccagtgatgaaaaagagaatgaaatgtgggtgacgttgagaaaggcaagaagatttttgttcagaagtgtgcccagtgcctaaaagggaggcaagcacaagactgggcctaacctccatggtctctttgggctgaagactggtcaggccattggattctcttacaaagatgccagtaagaacaaagagatcacctggggagaggatacagtgatggagcatttgcagaatcccaagaactacatccctggaacaaaaatgatctttgctggcattcagaagaaggcagaaagggcagacttgatagcttatctcaaaaaaagctactcatgagtaataattggccactgccttatttattacaaaacagaaatgtctcatgacttttctatgtgtaccatactttaatagatctcatacaccagaattcagatcatgaatgactgacagaatattttactgggcaatcctgatttaaaactaagactggcttgtggttaaatgaatgtgttcagtttttgaattttaatagtaattccaattcagtaaatgctatcactgtttaccccttctaaagatatgattagacttcactggtaatgttcaacttttcacaaagatggtgactgccatcttaaaacttactggatattggtttatatttagatttctataactggttatgtgaatatatttaaatactcgggaaattccttcactgtctcagaaccaagcaagattcatctgtgttttgtgttcatttgcctcttaaaggcaagggttgaagataaataaggtagcaacgtctactttatatttttggccttaactatgccaatctaattagaattctctgcatttaaactggttctttttacttactgaagggcattttagtgtggtttatgtgtaatatcaaagattatttaacatttctcacattttatagatgatctataaggtcacatgcttttaatatagtagcaagttaaacttcactcttgaattctttacaatctaagtcaaactaagttataatttaagattgtctttaaacagccattcagatacataaaactgtggaactgctctgtatttgtgattgtggatagtgcttttgccaacttaaaagaattaaagtagaggagatatacataaattttaaaattatgtgtgatcataagacttaagataattaaaaagaaattcacagatcattacaaaaacatgttcatggcaaagaaaagacatattctaagtagattaataattacagatgtgtcaaatatacagttctaggatttatgatgtagtcattaagttcatcaaatactataatgaaatatgtaatttaatttaaataatatttagaaattatatccatatattcaacaagtaattattaagtgtatttatgtgccagataccattctaggtgcctgggatgcatcagtgaacagaatacatctagtgctgcatgagggagcttcttttttagtgaaggaggacattagacacagatgtataaatgagtcattgaacaagataattgcaggcagagatggattctatgaaagaaataaatcagggtgatgagagggaaagtgacagagagacagctttaggttggaggctaaagtgaggcctttgaagaaatgataattcatgtgtgacttgaatgacaagataaaatgtagagagttagaggctgaggattacaggccaaggaaatagccctgtgcatatgttgtgagacatagctccaagacatagacatgcatagtttaattcaacttgactcttccagaaatgaattgaaggtcgctaggcctggagtgtcaggaagcagaggagaagttgtgagagaagagtttgaagtgagatgcctgtgtcatttaatgaagcaaatcacatgaaaaatatcactggcattttttattatacgacttatttaaaaatagcaataaaatttacttcctactttatcctaaggttctgaagacctttcaatggtgttcttggaggagagtttacaattttggtgtgtatcatgattgtaaagataccctgatatctttataaaatagaagtaaatttagaaattaaaaaaaacaaaactttcctgttctctcggtcaatcactgacagtatgtaaaatcattgcctagttgataaattcattcaagtctttcattttagttcaaggagactttagtttcctccttttggattataaaatggcagttacctggatcccttttgtatatacaattcatgacttacacataccagttttgtacatatgttgtaaatagctactattgtaaaagaaaaaataattttcacaggaatattttctgtgtataacagaaatggcttactttgatgtctttgttgaaaatatgtccataactaatgtaagaatattctaaaactttatttaaaaattttaaaagaacatttttatggataagcaatctcaatattataaaaatgacttctctttcccatgtaaatgtaaaacttcccatcaaattctgatagaacttaatattaatggatcttgatacaacatataaaaatcatgtgaaatacaagggaccaaaaaattgcaaaaatatttttgaaaatgaataaataaattagtgttacttaagccacagtatattaagtcttacagcacctgaaagtcgtattgtgcagagacagataaatggaaagctaagcaaaataatgattccagaaatcaatcaataaacaaacacatatacacatatatttgatatatgactattgccattgtagactaacaggaaaaagagaagcaattcagaaaataattaaaaattagttatacatatgaagaaacatgaacttagattaataattccttccttatattacatacaaaaataaatgctatatttattagtctactatgtaaaccaacattagaaagtctttaaagaaaatataatagtatgtctttacaacacaagatatgaagagcattctaaataaaaactccaaaagtgaatcataagctggaatgcaatggcgtgattatagctcaatgcatcttcatctccctgggctcaagcaatcttccaagctcagcctcccaagtagctggaactacaggtatagagacggagtttggctgtgttgcccaggctggagtgtagtggtgtgagctctgcttactgtaaactctgcgcctaaccccaggttcaagcaattctcttgccttagcctctcaagtagctgggattacaggtatgtgccaccatgcccagctaatttttgtattttaagtgttataccatataatttaaaaattcatttaacataacttgttcatcatctctatttttgcctagttcaacatggctgccataaactggatattgatatctatgaggttctcctctgtcccaggacaggtccagaaatgtcatcaaggagcgaagacgccagtgtggctgagctgttaacccaagctcaagagaaagtttcctttactcttctctctcctttgcccaagtggaaggggtctcttcccataggcaccgcagctggctatgtgctggttcacacttgaagtcagcatggttttgagtgtcacccaaggcccacagtgaatactgcccagctaccattgctgcttgttgagggtccaagggcactttagttagctcatgatgaattctgcaaaaattgggtcctttccttgaaggcagtgagttccattctggcccaggatgtatttcaaaatgtcctccaggatttatttttagagcagttttaggtttacagcaaaagtgagcagaaggttcagggatttgcagtatagcccccgcctgtcccacacgtgcatgcacggcctctcccaccacctacatccagtgccacagtggtacatttattacattgacaatacatcatcatcaccaaataccatagtttacattaggcttcactcttgacgttgtacattctatgtgtttggaatgacatgtatccaccatcatagtatcatacagaatagttccactgtcctaaaaatctctgtaatccaccaagtcagccttccctttccattaacactaggcaaccattgatctgtatatggtctccatagttttgcctttttcagaatgaccctatagttgaaatcatatattatgtagctttttcaggttggcttttttcacttaataatatatatttaaggattgtttgtcttttcatggattgatagggcatttctatttaatgctgaaaaaatattctgtagtttaaaggtacgacaatttattttactattcacttactgaaggacgtcttggctgcttccaagttttgacaaccatgaataaagctgctataaacatcaatgtacaggtttttgtgtgaacataagttttgaactcatttaggtaaattccaagaggtacaattcatgggccatatgctaagagtatcttcagctttcgaagaaactgccgaactgtcttccgaagtggctacacaatttgcatttccaccaacattgtgtaatagttcttgttccacatccttgccagcatttggtgtttccagtgttttgcattttggtgatcctaacaggtacattgtagaggtacctcattgttttaatttgcatttccctaatgacacatgatgtgagattttcttatgcttatttgccaaatgtatatcttctttggtgagatatatgtttggggaaaggagaatggtttgaaaatggtaatgaggagaaagaatgacactgacaccagctccaggtcccgtggaatgaaatctatggtaagtagtgttaactagggtccttagaagaggttcagacttacattc

SEQ ID NO: 619 - DNA, 1826 bp, Homo Sapiens
ccaagaggtgggaacaatctaaatgtccaacagatgaatgaatttttaaaaagtggtatatatacatacattgagatattattcagccttaaaaaagaagaaaaatcatggccgggcgcggtggctcacgcctgtaatcccagcactttgggaggccgagacgagcgaatcacgaggtcaggagatggagaccatcctcattaacatggtgaaactctgtctctactaaaaatacaaaaaaattagccgggtttagtggtgggcgcctgtagtcccagctactcaggaggctgaggcaggagaatggcatgaacccgggaggcggagcttgcagtgagccgagatcgcgccactgcactccagcctgggcgacagagcgagactccgtctgaaaaaaaaaaaaagggaaaaatcctgccacatgatatggtatgggtcaaacttgaagacattaagctaaataaaatgtcagtcacaaaaagacaaatattatatgattccactcacatgaagtatcaagtaatcaaactcacagaaaaagaaagtaaaattgtggttgccaatggttcagggtgaaaaaaaagggagttagtgtttaatgggtaagaggttcagtttcgcaagacaaaagatttctggatatttgttgcacaacagtatgagtataattaatgctacagaactgttagaaaagagtctctttcagatttagatactagaaaatgtatgagtaaaatacgatgtctgaaatttgctttcaaataatctgaaggctggttggggaagttgttggagtcatacatgaaataaaactggtattagttgacaatccttaaaactgagtgggtttattataccattctctctctacttttgtgtatgtttgaaattttccatcataaaggagtttttaaaaacccaacattatcaaaatgaaaaataatcaatacaagtgctggataagaaagtcaaggaaatatcacagaatgtataatttaaaagatttgctgaggtgtgtgtatcacctgagctcaggagttcgagactagcctggccaaaatggcataaccccatctctacataaaatacaaaaatcagctgggaacactggtgcacacctgtagtctcagctactcaggaggctgagacacgagaatcacttgaacccaggaggcagaggttgcagtgagctgagatcacgccattgcactccagcctgggtgacagagaaagactctgcttggtcacttttttggcggaggagaatgcagttaaaaaggacatgtccccggggattcgaatacacttctcaaagtgtactgctggccctctgtatccatgggttctgcatctgtagattcgatcaactcaactcctggctcaatactgatggaagtaatctgcttaacaatctcagaaggactgtgcaagtcaatgagtcgcttgtgaattctcatctggaaacgatcccacgtcttagaaccttcaccacaaggagtttttcttgtagtgattctcaaagtcttggtaggcattcgaactggtcctttcactttgagattcttttcttttgcgcctcttatcaagtcagcacacaccttttccaaggattttacgttgcggcttgttagggtgattcgaattcggtgaattgccacctccggctccacgggtgtttttccggtatccttaaaagccatggctgttgcgcgcgggcttcctgaccgacttgttcctcggcgagagcgaacagcggtgagtcaggagcaggagcgtgcggaccaaaaatcctcagcccttacgaccgcgtcttcctcaaaaagaaa

SEQ ID NO: 620 - DNA, 4046 bp, Homo Sapiens
gccgcgcaggcgccgggcgggccagacgtaggcccgggggttcccggcctggccgggtagcagcgcgggggcggccctggggcggggagacagggggcggctccactccggcgctctgcggaggacagcagcgatcgccaaggctcagtgagtccccgcactagcgcggcacctggcacttggcggggccgaaccaacgaatgagcgaatttgccgagagtcgccccgtctgaatccattgactctttccttgcctcggtcctaccctcattcctcgactcacttcctcctgcccttcctcactatctccctccccgctcatatcctccctctcctttcctcattcccttcttcactctcttctctcctctcttactccccccctctcattccctccctccttcactctctcattccttcccttcctatcttacccaccattcccttcctccctcactcattcactccctccctgtctccccctctcatcccctccctctctcattccctttccctccctccttaactctcgttctctcctccctctctcattccttccctccctgtctcatttccccccttctttccctccctccctctcctcttctcccattgcctccctccctctttgattcccttctttcctcctctcctccacttgttcccttcgtcacgcgctcattccctccctcccgcggcctgctccttccccgctccctccgcggtcggtgccgctgaccgtagcgcgccccctgcgggatatcggggagaatcgcttaacaccgccagagtgaacaggtgctagtttgtgtgcccgttcctttactgagattttgcagtaaatctaattcccagtcttaaagcctggtcccagaggtccgtgcgcgggtcttggcattcattgttctccacctcaccttcgagcaggtcccatcctccgaggcgtatccgtaatggctgcgcccagagcttggagccacagagcctcctgatgggataaggttggagtgtcccacactgtggttttgagagggactgtgaagggtggagagagtggtagggggaggatgtggctggagatggctcatggttaaaaagaaaggtggggccgggcttggtggctggcgcctgtaatcccaacactttgggaggccgagacgggcggatcacgaggtcaggagatggaaaccatcctggccaacatggtgaaaccccatctctaccaaaacacacacaaaaaaactagccggtcgtggtggcgcgcacctgtagtcccagctactcgggagcctgaggcaggagaatcgcttgaacccgggaggcagaggttgcagtgagccgagatcacgcgccactgcactccagcctggtgacagagcgagactccgtctcaaaaaaaaaaaaaaaaaaaaaaaaaaaaattggtggaaggggaatgtaaaaggaggaaaatacacggaagagaattgctgtcctggctgagtccagagagataactgagggtcccagacaaggatcaagagaacgggattggcctccagaggcagaggttccaaatgggagtgggcttcctcctagaaagactttctggaggagacccccctactgtgtaacagaggaggactttgggattaagaaaagcattccaggaagccgacagtgtcagcaaacgtggaggtgagatccttcaaagtgagtggtgtggaggtttccagaattttctgagcctgaagggaaggttggagagcagaccctgccctttggaggcttgacttagccctgagggcaccctgtagccagggtgggcagatgccaatatggtagagacgaagactgagtagggagccagccacagtgctgtggtctcaggcagggagtgaagaccagagtggagcaggctagaaacctgggaaggaagcaggttccccagtataagcccagtgatgtgtgaagaatgagcccaggagatgggtggggaagtaggcccaccctgcctacaggggagccagagcaagagcaggtctgggggaagatgaggccccccttggctccaggtaggggaagactgacctccaaggcccaatgggaccaggtgtacgggtggacccagagaggagaggaaaaggaatcctggggcagcaacaagaaggccactgtggtctgaatgtcggtacccccaaaattcatatgttggaactgaatcctcagtgcgatactattataaagtagggcctttgggaggggtttaggtcatgagggtgaagtcctcaccatgggatcagtgtataaaagaggttcgaaggagctcatcccccacttttgccaggtgaggacactgtaataagcaccatcttcaaggcagagaatcggctgggcgcagtggctcacgcctgtaatcccagcactttgggaagccgaggtgggaggatcatgaggtcaggagatcaagaccatcctggctaacatggtgaaaccccatctctactaaaaatacaaaaaattagccaggcatggtggtgggcgcctgtagtcccagctacttgggaggctgaggcaggagaatggcgtgaacccgggaggcagagcttgcagtgagctgagatcgcgccactgcactccagcctgggtgacagagcaagactccgtctcaaaaaaaaaaagcagagaacggacccctcactagacactggggcttttttctgaaggctactgtgtcatataaaatttatattaaataaattgatatgcttttctcttgttaatctgtcctttgttagaggggtgtcaaccaggaaccttgtgatgcgtgaggaaaaaatattaccttttccccctactctttctggcacccaacaaacaagtggggtggcaaagacaccccacttgggacaactggcaaaagctctatgatcagaagatggcataagtggggctgggcacagtggctcagtgcccagctgggattacgcctgtaataccagcactttgggaggccaaggtgagtggatcacgaggtcaggagttgaagaccagcctggccaacatggagaaaccccgtctctactaaaaatacaaaaaattagccgggcgcggtggcaggtgcctgtaatcccagctactcgggaggctgaggcaggagaatagcttgaactcagagggcggaggttgcagtgagccaaggttgcgccactgcactccagcctgggcgacagagtgagactccgtctctaaaaaacaaaaaagaagatggcgtaatcagaagttgatattctgtctattggatcctgcttctcccctggggtcttcttggttccctgaagcccctcttccggagtccctgccctctatcggctctgcctcctgcttcttttctgtattgccatgatttttgctaaggataaaggacaacttcattggcttctttgggaaacttgcaatctccccaaacaggcccctctgagatttctcctttccatttgcttctgctcccccttcctccttttgccaccttcgatattttctccagtttccttgattcctttgatacgtccccattcaggccactctggccctccatccaacctgccagaactttttccacttcagcacttcagtcacttaaacattagggctccctgccctaaagggactcaaaatcctgcaaaaacaaccacctaaggataaaaagagaaaaaatgaaactgtttggaaactgggcaaatgaatactcttttaaaagtctttttctgggggccaggtgtggtggctcacgcctgtaatcccagcactttgggaggccgaggcgggcagatcacaaggtcaggagttcaagaccagcctggccaatatggtgaaaccccgtctctcctaatgatacaaaaaaaattagccaggtgtggtggcattcgcctgtagtcccagctacttgggaggctgaggaaggagaatcgcttgaacccgggaggcggaggttgcagtgagccaagattgcaccactgcaccagcctggcgacagagcaagaagactccatctcgaaaaatatata

SEQ ID NO: 621 - DNA, 3615 bp, Homo Sapiens
tttgctatatttgggtaatatatatttacatatatattcatttgacagagattctttatttatgaaagcttctcccaaaattctaagaacactttatgtgtgcatttacaacaaaattcctctttttctatcttttttttttttttaatagagacagggtctccctgtgttgcccgggctgatcttgaactcctagccccaagtgacctcctgccttggcctcccaaagtgctgggattataagtgtgagccacttctttttcataagaggtgtgaaaaccagttttcataaaccttttcaggaatgcttttttttttaattaaaaaccaagttttcacatcaaaatgattgtaaagacttttttttttaacattttaaatttgaaatagaagtgtatacctagatctcttcaccaactaggaaatccattgctgagatagcaaaattttctttttctttttttatttttaatttttgtgtgtacatgtatatattcatgaggtacatgagatgttttgatagaggcatacaatgtataataattacatcagggaaaatggggtgtccatcccctcaagcatcctttgtgttacaaacaatccaattatactcttctggttattttaaaatctacaattaaattattattgactgtagtcaccctgttgtgctatcgaatagtaggtcttagtcattcttcctgtttttttgtacccattaaccatccccacctcccccataccaccctgctaccctacccatcttctggtaaccatccttctactctttatttccatgattcaattgtgtgtatttttaggtcccacaaatgagtgagaacatgcgatgtttgtctttctgtgcctgacttatttcacttaatgaccatccatgttgttgcaaatgacacaatctctttttttttttttttttttttttttgagatggagttttattcttgttgcccaggctagagtacaatggtgcagtcccagctcaacctccatctcctgagttccaagcagttcccctgtctcagcctcccgagtagctgggattacagacatgcgccaccatgcccaactaatttttttgcatttttagtagagacagggtttcaccatgttttccaggatggtctcgatctcttgacctcgtgatccacccgcctctgcctcccaaagtgctgggattacaggtgtgagccaccatgcctggccataatctcattctttttttatagctgaatggcactctattgtaagtaccacattttctttgtccattcatctgttcatggacacttgggttgcttcctaatcttggatgttgtgaacagagctgcaacaaccatggaaatgcagatatctcttctatttgctcatttccaggaagcaggattttctatcagcctgaaggagccgactcttggttactcatgtcaaggaaaacacacacaatttaaatagtgatcatttatgatcttgtctacatagtattgaactacataggtttttccctcacattcagtcaatgttgagcacctactgtgtgccagacactgtctaggcaccagggatacatgcaggaatgaaaccgacacaatctgttacttcacggagtttatattctggcattaacttgtttttgaaaatttaggctgtaggccctttctacagcctagttagctgaagaagctttctctggatgagctgaagtaaccttctcagcatatctccattttcacaagagggaagaaaggcactgggtgatgaagggatgtgcccgctgtcagctggccagcttgtggtgcagctagctgccagcccaggcagggtatctgtcgagctcttcttctttctcctgttccaaccatttcagggctggctggctgctcaggtctcatgaatccttacctggaaaggttgcaaagtttgttagcctctccatctttaaaaaaaatgtatacttgtttttaaaattattatacagtaaaattgacttcttttggaggatggtacagttctatgaattttaactcgtataaatttgtgcagccctcaccacaatcaggatacaaagctgttccatccacccccaaaaatctccctgtatagccacacccccccccgactaacctctggcaaccactaatctgttctctctccctatagctttgccttttctagaatgtcacataggtggaatcctgtatacctttgactgacttctttcacccagcataactcatccccatctttattttttttccttttttggaaaatttccttccacccatacacctgatttgagcattaacacctttcagatgattatatgttcaccacaagcctcccgctcttaaggaaactgataaagtatcttattgtaaagggtttttctctggagtgaagttgcaggctctgggtagttctgttgtgctgggtttttgttctgtgcctcccgtatgtgcataggaaatgtgtctttgaatgatgggggagctgtggaacgcactgccaaaaggaggtttcataccctgttcacctgattgtgtcacagaaatcagaaaaggaaaatctgtgtcagtgaatttcactattcaagtacagtcaacccctccagattcgggcatctgtagagtcaaccaaccttggatcaaaaatatctggaaaaaaaaattgcatcggtactgaacacatacagacttttttccttgtcgctgttgcatgaaataatacagtgtaacagctatttacatattatttacattcattaggtattacaagtaatctagagatgattcagtgtaagggttgtgctgtgtgtcagttatatgatttgatgtatggagtgtgctgtgcgtcagttatatgcaagtactacaccattttatatcagagacttgagcatctgtggatttgggtatctgtaggaagatctaaccattgcccactgatactgaggggtgactgttggcatggctgtcacaaatcccagaattcactgtgtatttgttgtcttagtcttcatcttaatcagtattctaggatttttttctacatttttgcttgtggtcttcactaaaatattttaacttttctgccctgtatcttatcttattttgacatttttaatattatgtataatatctcattttgaaaacttaaaaaaaaaaaaaaactatgtgatttatatatgtagttctccgggtaaaaaagaacctttctcctttttgaatttttgagatgttacctaccagtaatgttggtactattataaggcaatcgtcttataaactttttcactaaatagtcattttgttttctttgttttcaacacagtttttacgtaacagaactgttttcctcatcactattagaaatcagttgttaatgtgcatgctagtgttttgaattttaatattgattataaattcacatgtagattagtaatttgtaaaaaaaaaaatgtaaatttatgtaactcatttttcagatactttggtactaatgttattttatcgttaccaattcttacaacaaatataccaaactatggatttaaatgttttggcattaaaaactatttgataataaaatcaggaaatttta

SEQ ID NO: 622 - DNA, 1491 bp, Homo Sapiens
tttttttttttgagacagaatctcgctctgtcacccgggctggaatgcagtggcgtgatctcactgcaatggctcagtgaatggaatggcacagtgaatggaatgcagtggtggagctcactgcaagctacgcctcccgggttcatgccattctcctgcctcagcctcccaagtagctgggactacaggcgcccaccaccatccctggctaatttttttgtatttttttagtagagacaaggtttcaccatgttagccaggatggtctcaatctcctgacctcgtgatccacccgcctcagcctcccaacgtgctgggattacaggcgtgagccaccgcgcccagcctaggaaaattcttctataaagggcctattgaggttaaagcagctccatcttggatgctactctgccagatggagtcttgctccatcgcccaggctggagtgcagggatgccatcactgcaacctcagcctctcaggttcaagtgattctcctgcctcagcctcccaagagtacctgggtctacaggcgcatgccaccacacctagctaatttttgtatttttagtagagtcggggtttcaccatgttggccaggctggtcttgaactcctgatctcaagtgatctgcccgcctcggcctcccaaagtgctgggattacaggtgtgagccactgtgcctggcctcttgcatcatttttatgtgcagtcaggaggtaccttggtagacgcatctatgagagcagaacctgataattagggaaaccaagttcaggctcagtgctgtaatcctccatcaggtctcatcacttgaagacaagcagcatattcaatgtcctctaaaggacaataaggtttcttgaggatagagtttctgtgatcttagcacctagaagagagccttgcacacagcaggccatcaataacatctgaataaaggattaatgatgttccagatctaggaatcagtcatttatgattctaagttacggatagttatattatagatacagatatacatatacatatacatatatatcaatatagagatataggcttatgcatgtatatatagagagatttatatatatatacatatatatatatcaatatctgcctatatcattagtaacagataaatcacagtctgcatttaggtaaattatgtacttatttgcctatttaacattctatttcttgccataaaattgcaagttccacaaggacagaaaattggcctggcttgttattgttctattgtcaatgcctagaacagtgtccggaacacagtaggtattcaatacatttttttaaattaatgagtgaacgaattgttgatgcacaataagtacatagtttctctctgagtttcatgcagacacagaattttttcttctgttctccagctgtgacttattggatgagaattgcataatcacactaattgacttcataacaaatttatgatttcccatctcagccagactc

SEQ ID NO: 623 - DNA, 1417 bp, Homo Sapiens
taggtgtgacacgttcacataactgtgcagcacatgccgggagtgatcagtcagacattttaatttgaaccacgtatctctgggtagctacaaaattcctcagggatttcattttgcagacatgtctctgagcttctatacctgctcaaggtcattgtcatctttgtgtttagctcatccaaaggtgttaccctggtttcaatgaacctaacctcattcttcgtgtcttcagtgttggcttgttttagctgatccatctgtaacacaggagggatccttggctgaggattgtatttcagaaccaccaactgctcttgacaattgttaacccgctaggctcctttggttagagaagccacagtccttcagcctccaattggtgtcagtacttaggaagaccacagctagatggacaaacagcattgggaggccttagccctgctcctctcaattccatcctgtagagaacaggagtcaggagccgctggcaggagacagcatgtcacccaggactctgccggtgcagaatatgaacaatgccatgttcttgcagaaaacgcttagcctgagtttcataggaggtaatcaccagacaactgcagaatgtagaacactgagcaggacaactgacctgtctccttcacatagtccttatcaccacaaatcacacaacaaaaaggagaagagatattttgggttcaaaaaaagtaaaaagataatgtagctgcatttctttagttattttgaaccccaaatatttcctcatctttttgttgttgtcatggatggtggtgacatggacttgtttatagaggacaggtcagctgtctggctcaatgatctacattctgaagttgtctgaaaatgtcttcatgattaaattcagcctaaacgttttgccgggaacactgcagagacaatgctgtgagtttccaacctcagcccatctgcgggcagagaaggtctagtttgtccatcaccattatgatatcaggactggttacttggttaaggaggggtctaggagatctgtcccttttagagacaccttacttataatgaagtacttgggaaagcggttttcaagagtataaatatcctgtattctaatgatcatcctctaaacattttatcatttattaatcctccctgcctgtgtctattattatattcatatctctacgctggaaattttgggtctcaatttttactgtgcctttgtttttactagtgtctgctgttgcaaaaagaagaaaacattctctgcctgagttttaatttttgtccaaagttaattttaatctatacaattaaaaccttttgcctatcactctggacttttggattgttttttacattcagtgttataatatttgattatgctgattggttttggtgggtactgatgcgaattaat

SEQ ID NO: 624 - DNA, 2324 bp, Homo Sapiens
ggagatgcggaccttgaggcttaggatcccctcctagccgagtggagtggagtgggaatgtccagagccctgaaccttcacggaagcccccgagacacctattattagtgacttcctctgaaatattcagtttaacatatagaaatatggtttatctaggagtgttgttgttgtttggcttaaagctgtctgaaatgggtttctgtttcttgcaactgaagagtcttagctgaagaggcttaactagggcaacgatgcttcagtgtggttatgaggattaaataacataaagtatttcaagcacttcagttagcacctccagaaatgtttctcccctcttccaactgttaacagtatcgcatgtaccgagaccatcagacttacctgtgttttgtacatgctcaaaataagagcccattttgcggtcagttttcttttctttttatttatttatgtatttatgtatttatttattttttgagtcggagacggagtttcgctcttgttgcccaggctggagtgcaatggtaagatctcggctcaccacaacctccgcgtccctggttcaagagattctcctgcctcagcctcccaagtagctgggattacaggcatgcgtcaccactcccggctaattttgtatttttagtagagacggggtttctccatgttggtcagggtggtctcgaactcccgacctcagattatccgccccccccccaaccccggcctcccaaagtgctgggattacaggcgtgagccacctcgcccagccagttttcttttttgcaagtttttcctcattccatctttcaggtggtgttatgatttatgtttttttttttgctatgttttaaagttttgtttgttcctgaaaggattgagttagtcatactcctcagttcatggcatactatcatcagaccatgacagtgaggccctcttgttttatttatttatttatttatttatacccttcaagtcccattttctcactacaataggcaattttctaatgtgcttaatgtggatatttccatttatgtgttttctaaacatagttattatttcgtgagcatgcattattaaatgtacttcaaacctactgagatatttgtctcattacttatatttgtttaacctaagcactgttttttggctccatccacgttgccagatgttaatatttaatctgttacttcacattgatgcctaatagtccgcggtatgcatctgtccactcttccattgatgagctcccatgctgcttccaactccatgctactacaaataaccctgcattgaatccccttgtgaacttgtaaataatttgttttatgttacttaggggaggaattgctgctgggctactgggtataaatctgtttaatgtgtccgagtaatgccatatcgctttccaaaagtggtggaaccaatcttgcagcagtgcaagattctgtatttccacgtctgacaacacttgcaatttttctttttcttttcttttcttttttttttttctttttgaggcagagtctcactctgctgtctaggctggggtgcagtggtgtaattatggctcactgcagcctcccaggctcaaccgatcctcctgcttcaacctcctgagtagctgggactataggcacatgccaccatgcccaactaattttttaatttttttgtagaaataggatcccactgtgttgcccaggctggtctcaaactcctggggtcaagtagttctcctgctttggcctcccaaagtgctgggattacaagcatgagccactgcacccagccaacatgtgctattttctagatttctaatcactggtttgataggaataaagtgatatctcattatttgtttaatttgcatttgattactaatgtaaatttccatatatttattagctttctcctctgcaattaattgcctgttcatattctttgcttcttttttttaaattgggttgctttttcctgttcatttgcaggcgttccttacatattttagggtgatattacactgttgtcagttttagacaaagcaaatatattctccattctgccatctgcccgttaacttcgttaatgatgccctttatggaacagaaatccttaattttttaataatgaagctccccagcttttgctttatgacttgcgcttttaaaacgttgaaatatgggtaccactttcttagttgtgcttattctctgccagatatctccaaatctgaattcactggtgaggtctctaggcattccattcactcctcttcactgaattccaaagtcactgttctgactgaatttaac

SEQ ID NO: 625 - DNA, 2249 bp, Homo Sapiens
agcagagcccataacatcctttcatgttggtgctttctgattcacagattgttcaagtaaactttgttaaatttcttttgtcagaagttcttcttttaacaattgtgtgttaagacataactctgggagcgttttgcaaaatgcttttgaacagggagaaaatgttggcatgaggatgagtttggatgcctttgaaataatccaggcaatagataactttaagagatgggagtgttccaggtggagtaaatagcttctgcagaagcccacaatctaaatgcccaacagggaacatctgcttggaactccctttgcttgctcttcgccagtgcctttgactttcatcacacctgttcaccagctctatcagcttggtagaagtgaaagccctactcctggcaatgggtcatttgagcttagaggagtgggctggagaagaggaaatgataccatgttcttttaagaaaaaagaggaaaaagcccacaagatgaacactatggtgtataaccctgtcatgtctttttagcaatgaactttggagccctggaaacaagtagccctaagttacaacactcaattttaaatgggaaagagcatctcctaaaagaaaactatccagagaagctgtgaagagaaattcaaaggaagggtaaactctgagtttacagtgtggcttcttgccattttgtatattgacagaacactataagccttatgtcaatatcctgtaaaggatgagtgtcacaggaggcatgaaaaataaagctgaaagaaatttgtataatatctataaaagcacttctaaccctgagagaaagcattaaaataaaagagaggggctgtatgttatctctgtttctgcataagaatgcagaagaattcatgaactctgcgaatgcagaagttaatgaacatcatgaaaagaataaaagaggaatgaaaatgcaaacatacaagtttgggatgttatcacacattaatcggaaatgcaaaaataaattgacaatactatgtgttggcaagaacacaatgggaactctcattcactactagtgggtgtgtaaattaatacaaactgtttgaaaacagttttaacttgtcctttcaaactatactacaaggctacagtaaccaaaacagcatggtactggtaccaaaacagacatatagaccaatggggcagagcagaaacctcagacataacaccacacatctacaaccatctgatcttcaacaaacctgataaaaacaagtaatggggaaaggatctcctaatcagtaaatggtgctgggaaaactggctagttatatgcggaaaactgaaactggaccccttccttacaccttatacaaaaattaactcacaatgcattacaaacttaaatataaaatccaaaagcataaaaactctagaagaaaacctaggcaataccatttaggacaggcatgggcaaagacttcatgacaaaaacttcaaaagcaattgcaacaaaagcccaaattgacaaatggggtctaattaaactaaagaccttctgcacagcaaaagaaactatcatcagagtgaacaggcaacctacagattgggagaaaatttttgcaatctacccatctgatgaaagtgtaatatccagaatttacaaggaacttaaacatatttacaagaaaaaaacaaccccatcgaaaagtgggcacaggatatgaacagacacttctcaaaagaagacatttatgcagccaacaaacatgaaaaaagctcaacatcactgatcatcagagaaatgcaaatcaaaaccacaatgagataccatctcacaccagtcagaatggtgattattaaaaagttaggagacaatagatgctggcaaggctgtagagaaataggaatgcttttgcactgttggtgggaatgtaaattagttcaaccattgtggaagacagcatagtgattcctcaaggatctagaaccagaaataccatttgtttcagcaatcctattactgggaatatacccaaaggaatataagtcattctacacatgcacacgtatgtttattgcagcaatatttacaatagcaaagacatggaaccaacccaaatgcccatcaatgatagactggataaagaaaatgtggtacatatacaccatggagccataaaaaggaaggagatcatgtcctttgcagggacatggatgaagctgaaagccatcatcctcagtaaacaagcacaggaacagaaaaccaaa

SEQ ID NO: 626 - DNA, 1106 bp, Homo Sapiens
ggaagaatgagacacctctcctggcttctgatgttcccatccctgaggaggaacacctattactctaatactcccgcctctgtttcacacctttactcactttccccaggaagactgtatattaaagggttcagcatggggatcaccgtggtgtagaacacagaggacaccttctcctggtccagggagttacttgaagggggcttgaaatacatgaaggtaatggacccaaagaagatcaccacagccatgagatgagagctgcatgttccaaaagctttggaccggccctctgaggagcggatgtgaaggatgctgtagaggatgaaggcataggagacagcaacagctagggtgggcaccaaggtgttaaaccccgcaatgataaaaagtagaagctcattgaggtgtgtgttggagcaggagagattgaggaggggaagaacatcacagaagtaatggttgataatgtgggatttgcaaaaggacagtttcatcatggcacttgtatgagtcaaggcagagagaaagcccaagaagaaggcagccagcactagcagtgagcagacccatgaggacatgatcgcattataaagcagtgggctacagatggcaacatagcgatcatatgccatggcagtcaggaggtaaccctcagccaccacaaagaccacaaagaaaaagagctggaccatgcactcagagtaaaggattgtattcttctttcctaggaagttcaccagcattttgggagtaatgacagaggaatagcagaaatcgacgaaggacaagctgctgaggaaatagtacatgggggtgtgaagtagagggctgactgcaatcaggagaatcatgcccaggttgcccactactgtgaccacatagattcccaggaacaggaggaagaggggcagctggagctctgcttgctgtgttaaaccatctaagacaaactgagctgccatagaataattttccatggtcattcttctttaggcatttctgtgaaaatagaaagtatgaattaccttaacatggaccctcactgctcttccaaacaaaaccaaattgcataagggaggttgacagcagctaacagactgagt

SEQ ID NO: 627 - DNA, 1318 bp, Homo Sapiens
gtagcttccacgcgggcaggtccggaaactgagcatgtctgcaagcgctcagcggcgccggcagcagcggggctagagctgggctgcgtcaggctgagcccattcacctcgcggccacaggagctcagcgccggcgccgcgccgcccagccccgccgagaggggcgcactcgccgccgcggggcccgccgccgctcaccgcagccccctcctggcgacccgcaagaggactcagccgccggctgcgaccaccgtggactccctctatggaagggaatcctgggagtcccggccgtcagaggggttcccaaatccaaagggtccatctccaaggcgtcactccaggggtccgcggttcactttgctgccccttgcaggtgatgctgtgattgttgcctgcggactgggaagcacgatggctccaaaaggccagcggggccgagaagcagggacagagaccagcatttaagggatctctggtgggggcctccctggagttctccacatgtaaatatagcgaaaaaagaaaacactacgttactagaataaacacgtcctaaaatttctgtgcaaaaacacctttttgaacagcaaagatttcacccaccaaaacaaggaagcaagaagcttccacagtgtgcaggatccgaaacaggaccggcccggcgttgggtgagagtgggggaggggttgtcggcttctccatccagcttgccatgttctgtcgtcggtttcacattttcagagagactttaccagatgcaggaaatgaggatgaaggcaactctggaaggatgcaaagaagggagagcaagcactgtacctactgtctgctgtctaagagggctggtctcataactaaaaggtccagtccctgagatcttgtgtgcaaccgtcagaaatagttcaggacatcaaattgcacagagaagattcagatgaagggaaacaagaactctgtggaaaactgttggggacagtggcacgagttgtcttgcaaggtgatgtctgtcccgtggagggacacaagagcgaggacagcatggttctaatggccagggcatgtcttcttattccatgtgacagtggctggctgagttgctagtacgtttttgaaatataccctttgaaatatgttgattattctggacatctgtaaggtgggagatttgaataaaaagacttctgctgtcattattggcttttatggctatgatttttttcagtcattattataaatcatgtgaaggtaaaataaatgatcattttagccattctgttctgcacagaatgctgttcaaataaaacatcatctgata

SEQ ID NO: 628 - DNA, 2549 bp, Homo Sapiens
ctttgagcaagaggacaaacctgggtagggatctctatgatgttttctgcgttgcccgtggacgttcatctttctgatttgttagctgaagatgaggatctggagcaggagctcggagtgccattgttccatgggcagatgtgcagcagagattagcattaggaagacaagcagggccttcagtaggcataaggtgatgaggttcatgccgttggatcccacgggtgccctggggaagagatggttgggaagtctgagaggaagcaggagagctttcggagcacatggatgccgtccagaatggagatggttgtggctcggaagaaaaagaaatcacccagctcggagtcaggatacatttggaggtccaggccgccgagtttgctggtggggaagataggcaccagaaaggaaagaggacatccagggcaatttcttctgccccccagccaatccgtacattgtccagagggtcttgctctgtcatccaggctggcgcgatctcggctcactttgacctctgcctcctgggttcaagcgattctcctgtcacagcctcctgagcagctgggattacaggcaggcaccaccatgctgagctaatttttgtatttttagtagagaccaggtttcgccatgttgcccaggctactctcgaactcctggcctcatgtgatccgcccacctcagcctcccaaagtgctgggattacaggcgtgagccactgcaaccagctggaacaatcttgatattagggtgaacaagtgatttcatagctttctctgaaggaggaaacactgggagcatccacccgagaatcaacactgtggatcattctggggagttaatagttttgagatgtgtcccaagataattgttagcttgaattaccacgtggatggaaccatgctgatcctaagagccaggtaatggccaaaggtgccattcaggtgaaatccccaggtggaaaattcttccacttccaatgatagaattctattactctgcctatagtttggtgaaacaagactttacaaatagaggacaagatccattttgccaagaacaaccatatggatttaactgctgctaacaaccgttaggaaggaacatcaataaaaagcaagcctgtgagacaactccttccccaaggggcgcttgttacagagcgcgggccccagcaggcctggtccatcctccacattctttcctctctgacttatttttactttctgtttgaattggcttggttttattttgccctaaactgtgtctgtagtcatcccccgacagagttttgagagtgaaagtccgatctgcccacgcttcacagaactcaatgcggagccttctcaggagtcacttgacgtcaaggctgacttttaaatttgccaaaaaggcattctttggggagcggtcggcaccatcactttccctctttagagagctgctactggctgctggaattcaaaacccacaaattgcatttctaaacttaattcgatacatagatgagcggaaagatcagacattgatgctattgttttcaaccaagatgttttactatatcatttatattttgtttttttcttcccccagtttttaaactttttgtttgtttgttttacaggccaagcctactgctgttagaaaacatatttagaaatcacttggttcttccttgcctgaacatcatctatttagttagcttgtgttgtttagatgtgcttcagatctcaaaaaaataaattatgttatttgaaagcttgctctctgcttgtttacactattaatttagagtccagaggaatctctaaatttgcctctagaaaccacataatcacctaataatacctttcctgactccactttctgacacaaagtgacttttgaaacgcttccatcttccctttctatttaatgtactgcactccactcttttttcctttcgttttttctacagtccgtcatggagtatttgtttaccaaatgttacttttcttggatccaatctatttttgaagagcgcaaaagcaaacaactgtttgaagctgtcaagcttcattttatttatgcatgaataacacaaataacttgaaaatgacctagtctgtttttctcagatttagatagaaaaactgcttccggccaatgtttatgccaatttgttcatgccaagtttccagtttcggtgccaaccggtttttacagccaagttgtaaaccttcggtaaacatggcttataatgaaaagtgcaacacagcctgaaccctggcaccaggggacggatgtaaatttattctaagaacaaaattctaacaggaacaggaggggagctaggctggctacaaagtgttcccaccgtaatatggaaaatgtacagatgatgatatatttgattactaagatcccattaggccaatttaggcactttatgtatttcctttgctctggacgctgagtggtttcatgctcaatttgaagcaactggctcattgtctcagggtggttctagaactttgccttcaggtggggctggggagggagcc

SEQ ID NO: 629 - DNA, 910 bp, Homo Sapiens
tatgacagatgccactgtgaccttctccaaggactttctggcaggtggcgtggctgcggccatatccaagaacacagcagtgcccatcaagtgggtcaagctgctgctgcaagtgcagcatgccagcaagcagatcaccgcagataagctatgcaaggactagacagactctgtggttcatacccccaaggagcagggagtcctgtccttctgccacggtaacctggccagtgtcatcagatacttacccacctaggctgtcaactttgcccaaggtaaacagaagcagatcttctgaggtggggtggacgagaggccccagttgtggtgctacattgcaggcaatctggcccccagtgatgccactgggccacatccttgtgtatggtgtaccctcttgattttcgcagctacttgactttgtacctgtctagcagctaatgtgggtaaagctagagctgaaagggaatctagaagcctcagtaactgcctggttaagatctacaaatccgatggaattaagagactgaaccaaggctttaacgtgtcagtgtggggtattatcatctaccaagctccctactttggtatccgtgacactgcaaaaggcatttttccagatcccaagaatgctaacatcttcatcagctgatgatcgcacaatctgtcactggcattgctgggataaaaagtcattcctatccatttgatactgtttgccaccacaagatgacagggtcagggttcaaaggaactgatattctgcacacaggcatccctgactgctggaggaaaattgctcatgatgaaggagacaaagcttttctcaaaggtgcatgatccagcattctcagaggcatgggtggtgtttctatgcttttcttatatgataaaataaagaagtacacat

SEQ ID NO: 630 - DNA, 2554 bp, Homo Sapiens
aagtgctatgggtcatccaggtgaagatgttcagtaatttaacaaatatgtatcaagtgtctcctatgtgctaggcactgatgagtatttgaggagagagatttgggagtgatttgggtatcatcaatgtatcataaaagttgaagtcttgggaggggacaatcccacattcagagacgtgatgtagattaagccaagagaggactaaggacaggactcatctctgggaatgccaatatttagggggcagacttgagttgccagaacagagaccaaagaggagctgccagaaaggaaagaaaacgcttctggaggagagtgtccaaaaagccaaggaaagaacaaacttcaggaaagagggagaggccaacaacatggaatttcgaggaggtcaattaagaccactgagttttgcaagaataaggtgctcattataaagcatctgaggagttcagaagagcaccaagaaatttaaaaactaaagtcctaatacctgtcttcgacattaggtgaacattccagacatatatacagacagaagaccacatggatgacttatcaagaaacgaaaaatgtttacaaaaatgagatcccactacagtattatttttatttatttatttttatttttatgtttttgagacagtcttgctgttgcccaggctggggtgcagtggcatgatctaggctcactgcaacgtccgcctcctgagttcaagcaattatcctgcctcagcctcccaaactgggattacaaacatgtgccaccacgcccagctaatttttctggggttttttttttcgtagagacggggtttcaccatgttggccaggctggttttgaactcctgacctcaagtgattctcccgtcttggcctccgaaagtgctaggattatgggcgtgagccactgcacccagcctattttatttatttttcagaaaaagtctcactctggcccaggctggagtgcagtggcacaatcatagctcacagcagcctccaactcctgggctcaagcagtccttccacctcagcctcccaagtagctgggactacaggcccatgccaccaggcctggctaattttttaaaaaatatatttttaaggctgggcacggtggctcacgcctgtaatcccagcactttgggaggcagatcacttgaggccaggaattcaagaccagcctggccaacatggtgaaaccccgtctctactaaaaatacaaaacttagccaggaatggtggcgcatgcctgtaatcccagctactcagaaaaaaaaattatttttagtagagatgaggtcttgctatgttgcacaggctggcctcaaactcctggcttctagctatcctcctaccttggtctcccaaagtgctgtgattacaggcatgagccacggtgcctggccctgtgttgttttactgtttaaaactgttttactgtttactgtttaaaaacagtaaataaggttaggcagatggctcacgcctgtaatcccagcactttgggaggccaagatgggaggattgtttgagcccaggagttcaagaccagccttgggcaacatagcaagacctgatctctacaaaaaacagctaggcctggtggtacacacctgtagtcccagctacttgggaggctgaagcaagaggatggcttgagcctggaaagcagaggctgcctagccgagatcgtaccactgcactccagcctgggtgccagagcaagaccctgcctcaaaaaaaaataaaaaagaattagctgtgcaattcagagtcagctatggcctgaacggattaagaagctggggtgccctagactggtgtttggggagagtcctgggttggaaggagatgactgtagtctaggctgaccacatgcagactcctaggtgacttatagggctcatctgggtgtgctcaggctggtgggcagaggccacggtggtgctccgcctggggctgaggcagagcgtaaccctgatccactcctggaaagccaagaagcatcctatggcacacgttctagtttagacatacctgctggggagcgtgctttgcaacatggaggagggagcacttcttcctggcaggacaccctgggtcctcagaggcactccaaggtgctccaaagtatgacagcttttactattttactgctgtttacactgcagaatatatgaaagccacactctcttttcggggatagagaccccttgttagccctccactgagaagcagtggagaaactctgataaacaatgattgactaaatgcatattctgtgccaagagcttttcatatactatactaagtcattcaatgtagtgactatatagtcagtattcttgcccctgctttatacgtgaagaaactatgcttcagagaaagcagtttgcccatggttgtcctcaagcagatggaatccaaacccaccgggcatggtggccacacctgtaatcacagcactttgggagaccaaggtgagaggatcacatgagcccaggagttcaagaccagcctaggcaacataggaagaccctgtctctac

SEQ ID NO: 631 - DNA, 2189 bp, Homo Sapiens
tgaggacattgttgtgagggtgtgacttttgtgaagccagaaaactgtgcctaagattcattacagtgagtatgtgcagaggcccctgacccagtaaatgctttttgcctttttattcccaatgtcttggacagttgagacaacttggcccaactctgaattgtagcagtgatgtcttatatgcttacgagtttatattaattcagctgaacaagaactacatcttaaaccacctttgtaggtatgattaatacgtgcaacagctgctttaaaaggtggtatttattattcatcactcatgaaacttgactcagtgaggacttcattatttttatttctctttccacgtctccaactttttaaaaatcactaatttaactctttgttaagtactcaagtacaaagtgatctcttctttcatgaactttgctataactgttgaaaggattggtgtcaggctctctcaaccctgggagtttccaaaatttagcaaatattacttgtgataagcttaaatgccacatcgctaagtacaattattaccaggaatccgtcaagggggagatagccccgctcacacccttagacccaaacaggtgctggttcatgctttctccacaaattggcagttgggtacttccccactgtcatcacagttgagctcattttaacatatattcaaagaagctttttagtttctactcctgaattgtagtgttcaagttatttgccttcctgggtaagaaaattttaacccaagtctgggattctctggcacctgtcttttcccatcttttaatgagttggcaagattaggtcaaatttcaatgctaaatttgattttttgaattttaaatagttgcactttatttcatgctgaccaccaacttaatttatacattttaaaataaaattatcctagaagtgttgtaaacgtgggaaaattttaattagtgttggaggtcattagattggacccaggtttaaatataatgatctcttcacagcttatttgatgtttaagagcaacttgtgtgatcttagctttgcaggttttctgtaatttatgtagcacaataaaggataaccagttgactgtgttactggactctgagttctcacagctagtttcatctaagcttggtttattatcatttctgctttggatttttttgtgcatcacatgaatacttagaaatccatttgttttcagtgtagtacctagggtgaagtagatgctgcacaagtaagtttaagggaataaaagtcccgacactttatatacatgttgaggggcacgatttaagagactgaaacagtttacattaaactgtttttattttctgccagtagactctatctgcttaaaaaaataaaaattgttcaacccagtgttctccagcatcaggacattacagttgtaatctatgttgtaatcttttcaaataagaaaagctactccttattctctacagtgtaggcttaattttagaaccgataatttactatatctgcattattgatatttttaagtagtagttttaaaaataattatttctatgtggagggtgttttaatttgggattttttttttcttgtaacaggtgctatttgtaaatatgaaggggaaaagtcacttagttaaaagtctagcttatgtcataattaagatacaattattcatttcatgtttgattctattaaactagtggcaaaacagaattggtcccttagttttttagattacctttccccctatatcacaaaaatatctctttccatatgatctcataattgaggcaaagaagctaagggtttatttaaaatgtgtataagcttgaatttggtcaacactgcataatttgaaatcactctgcatttgtcactgcagcttactgtatgcttgaaaggccttgtgtgtttgtcttaattttagtgaaaaaattagaatttctgccattcatgtacaaaaaaattacaactacagcaaacaagataaaaatgctggtttgcattaatactgttttagtcttaagagcaatttatattatgtgaaatgctgttacacatattttgttggccatatttcattttgagaaacagttgttcaggtacaaacatgacaaacaactctagctatgactcttaatgttcaattgcaaaataaagatgtgctttagtaatctaaa

SEQ ID NO: 632 - DNA, 4317 bp, Homo Sapiens
acgcccatgtgagcggccgcgagcgctgggaggacggacccagcggtcgatgacagggcctggcgcggttcgcttttcctgggtgactgtgttcgtggggctgaggccctcgaggtgcccacttccagctttccaccaattactgcactgtctttccgtttcctgccccgctgacgcgtacacctatttcagactcagcgcagctccgcggggagaaaagtgcggggctccctctcggctccacaccagactccggagtagttcgaactgcgctggggtcgccaagacgcgcgctgcccttctcccagcactgccctccccagcgtctttgaccactcttaatacccacaaacttgatcggacaatttctggtgtgtccagccatgtgtcacgtactgggaatacaaaatagaatgaggcaagctccctgacctcaaagatttcagagttcagttggagaaatcgacagaatctggggtttgcttctcacgcaagattttcaacagcctcaattggtctctctacttccgttgttgcatttctatgatatgttgcccgcacaacaatcaaaatgatctttttagttagtttggagctttggtttgtcaaggaattatgagtcaaccatcaatatttgaactaaaagaaacaaaactgggccaggcaccgtggttcacacctggaaacccaacactctgggaggctgaggtggggatattgcttatactcaggaattggagaccagcctgggcaacatggcgaaacctcatctctccaaaaatacaaaacttagccaggtgtggtgacatgcgcctgtagccccagctgaggtgggagaatcacttgagcccaggaaatagaagctgcagtcagccgtgattgcaccactgcactccagcctgtgtgacatagcaagaccctgcctcaaaaaaaataaaaataaaaaaaagcaacgaaactggatttactgtgtactctaataaggaaaagctatgctgggtcggcacagtctccccaagcagagctggctgctgatgctctatggagctttggggaatacagagttcaggaataggtgcatttcagaggcaaaagggtttgccatcacctgtagaagagtagatattctggtaagactgttattaattctccactgaatttattggagtgaacctgtcattggctgactttgagaaaggaggggtttttcaaaacaagttttactgaggcagttgattaattgaatgggtttaaaactggttctaggagtgtggaaacttgctttaattctcagggcttcaaaaaattattatagaaatgtgaaacctacagaaaaaaaaaaggtaaaaaggtaatgtacccaccaaactgagcatccagagaaggacacaggaaagagctttttagtcagtgccaactcccctgtgcatgcctgagaacttctccttgggggcttgcccttcccaggagttcaggctacctggttaccttgcaacccagctgtgtctgatggtttcagttaaggttgtgactttgtagttcatctgagtttttctcattattgagaaaggaaagatgttcattgcagcttttcatatcctaagcacaaaagaagtctttcgtctcaattttaacagtacattaatggggtattaccctttttctcccagtttcacagttgtcttttgtctttatgaagtttttggcttatttgttttgtcatgaaaagggttttttttagaatatagtcaaatttatcaattttttcttttattgcatctggattttgaaacataattagaaatcctttccttgtacccaggttaaagaagaattcacccatttttttttctagtacttgtatggtttcattatttagatttagattcctgacccatttggagtttattcttttgcctagtatgaggtatggatcaaactttttatctttttctaaatggctaaccaattgttaagtccatctttgtccaagtgatttgagatgccacctttattgcatactaaattcccatatgtatttgggtttacttctggactttcttttcggttgtactgctctttcttgtcatgcacaaggaccactgtttttattttagaggccttagaatatgttttagtgactggtagatgtagtcccctttcatagcttttatttttgttttcctggatattcttccatatttttccacctgaaattagtatcagcttgcctagctccataagaaaactggtatttttttaatgaactttgaaaattaacttaaggagactttagtttttaatgttaagtcatcacatacaaaaaaaaaaagtggtgttccagtttttcaaactatttcatgtcttttgagagtgttttaaagttttcttcatatatattttacaaatttcttgttaaatttattattctttgttgcttttgtaaatgtagttttctctacctttatgtcatgttactgattatgtatgtgaaggctgttgatttatgtatgttaagtttatgtcctgccaacttattgaattcttctctagtttgacttagttttgctgttaattttctgtgatattccaggtgtactgtcataccatctgcaaagacaaagagttttactcactcttttctagttctcctgccttcaattgatttctctttactaactgcagtagtgagtatctccagttcaatgttaaatggcagtgaagatagtgtacattcttcccttagacctgggataaatattaaacaaacagaagagaaaggaatgctcttccttgtaatagaaagccaatcaatacatgtagaaggaatgatggaaatataaaaccactgtttgctaggcatcatcataatatctgatccaggcaagaatcagtagttactaaaattagtggataaaagtttgaagtgtaaaggatatatgcataatctcaaagtagctcctcaccagagatttattaatgacaaaggaaaaaatagtgcagaagcctggcccacatacgtgaaccaagtgatcatagttaatactaccagtattggaacaaagtgacattatgtgcccccagatatgcactgaaactgaaaacacaaaactctgtgatttacctaacaaaagctcatcatacctaaatctcagcataaggaaacatcaaacaaacccaaattgaaggatattatacaaaataactggcctgatttctcagtgtcataaaagactaaggaactgccctgattaaagaagactccagagacataacagctgaatgcaacacatgatccaggatttctttggctatagggaacattattgggacagttgacaaaatctaagttctgtaagtaatttgtattctgtcagcatttattttctgattttgactactggactgtggttataaaagaaggtacctgtggccgggcgtggtggctcactcctgtaatcccagcactttgggaggccaaggagggcggatggatcacctgaggtcagttcaagaccagcctgaccaacatggagaaaccccatctctaccaaaaatacaaaattagccgggtgtggaggcgcatagctgtaatcccagctactcgggaggctgaggcaggagaatcgcttcaaaccaggaggcggaggttgccgtgagctgagatcaagccattgcaccccagcctgggcaacaagagcaaaattcagaaaagacgaagacgaagacgacgaagacgaagacgaagaagaagaagaggaggaggaggaggaggaacttgtttttagaaaacacatactgagatatttagaagtcaaaggacatgtacatatattagatatatatgtatatggagagagaataaaacaaacatggtaaaatgttgccatttcaggtgtctgggtagaggtatgtgggaactctttttactagccttacaacttttctgtaaatctgaaactatatacaccacactttgacctcctaagagtcttgtgcatctttgtatctcaaacatctagaacagggccagcttgaaaactgcttaataagtgaatcccttaaatcaggagcacgttacaccacctagtggtgtaacaaaggaagcttactgctgtggaaaaacctgttcctgtccacaatgaacttgctcattctaactgtgttgacctattattagccaaacaaattgcacttattttataattatcaagtgatgggaaagtgaaagcaatttggggtgtaagtataggctttatcatcttggacacaaggtcactagactgaccagcctggtttcacaggtgtgggggtggt

SEQ ID NO: 633 - DNA, 1896 bp, Homo Sapiens
tttttaagaaaaaacatctattttgggggaagaaatttattgtgacaatgtattgtacttgacaaattttagttatcagttaagtttaatttctgatagaaaccctatcagcaactgtattaaaattttatacattcttggccaggcacagtggctcacacctgtaatctcagcactttgggagaccaaggctggtggatcacttgaggtcaggagtttgagaccagcctggccaacatgatgaaacctcatttctactaaaaatacaaaaattagccaggcgtggtggcaggtgcctgtaatcccaactactcaggaggctgaggcaggagaatctcttgaacctgggaggtggaggttgtagtgagctttgatcacaccattgcactctaggctggacaacagagtaagactgtgtctcaaaaaaaaaaaaaaacctttaaattgtattcatggtggaaagagttgaaatgtgaatggtcagtaaaaacttgtttcattttctaatcatattacctgctttaaaaacaaaaatcatgttgtctaatttcttattatataatggaaagaaaggtcatctaggatattagcctcttttaaaaaaatcttgttggccaggtgcggtggctcacgcctgtaatcccagcactttgggaggccgaggctggtggatcacgaggtcaggagatcgaggccatcctggctaacacagtgaaacccatctctactaaaaatacaaaaaattaactgggcgtggtggcgggcacctgtagtcccagctactcgggaggctgaggcaggagaatggcgtgaacctgggaggcggagcttgcagtgagccgagattgcgctactgcactcagcttgggcaacatagcgagactcgtctcaaaaaaaaaaaatctcgttattctacaaagtatatcaatcactccattaaatcttatttcatttaaaaacaatttttgttggagttcctctttcaatttgggtcaaacagctctttacgtgatgactttatgtcaaacctacatagagtttctggagtgggctccatccactccattaccatacctgagagaatgtcagatttcctgcttcctcatttgcatgacttctcaaagtcagcatgttgataatgacttatagaaaacagtccttttaaaaggaatggcttgctattggtttgggcaggaggcattttgaatgactgagcagttaagtcatctctttatttgagaataaatgatgaaggggtgtttgaatgggttaccaagttataaattaatcttgagatactcaaatgattgtaaaccacctgagctttcctctcagcttttaaatcatatgatatcaatctttgctcattttcctctgggtaatttgttattatgctgatggtaaccaactccatgagacattaaccggcaatccacattaccagtgagtatacattacagcactaaaataaaaataaactcacagaagaaatagcttgagatctcaaccatgcttttctgtctacaaaacggcatgacagtttggggatttctagctgaaaataaatttaattatgttactactttgctgctgctaattagtgcctaagatatgtatcaggagggcagcccagtgtaggtttcgaaagagggtttactacaaaggcaggatagcaaaatgggttacctttttcactctcactatgtaaagtgacatttaaattagatcctggaaattaccttttctgtttatgttagcaagatagtcttctcttttgctttattcaaatagggaagcaactttataacattttgtatcgcctacatgaagtgttttgcatatctgtaacctttcaattaatgttatttatgtttcaataaaccaccatgctacttt

SEQ ID NO: 634 - DNA, 3097 bp, Homo Sapiens
aaaaccctgcctcgctagcgcagggagaagtcgcaccagtcggagcgcagagggacacgcagacatttcagcagaggcctcaaaggcagaacaaaatagtgcaaggagccgcacatccgcacagtgctgagaccctgcccaggacaagcttggtgagtggaaaacttcctttgtcagcccttcgcgcacttccagcctcagatcgaggcatcagggagggtttccttgaagagggtgggctgagggctgtgtgttcccaccacccctgttgcccttccatggggtggggcagcaagtgcttcccctcacctcaaggaagtgacaagggttgcacggagagctctccccacacctttcagtgtttggggaaacgtgaggactggtctgagaagtcagggctgccgtggccagtggtgccctgccccagagggcagtggggtgaaggtgtgtggctcccagggaccagatgggggcccttttgaataggactccacccaagtgggctgcctggaagggcaaagggacccaacagagatgtgggccactggaaaaccagagacccaagggctgctgagaccctgccccacaactacacacatcccaacctcataatgaaaagtgtagttgagatagggttgccagattttacaaataaatatacaagatactcgtttaaatttgaatgtcaggtaaacaacatgtatgtttttagtatatgttaaatgaaatatttgggacatacactagatctttttttatttttatctatctaaacttcaaatttaattggacattctgtatttttatctggcaaccctaagttgggagctttatagcagaaattcaagtggcttctccaagaaacccacaaaagcaccccaaagaaaagtcagccctagaaaccccaatggcagctcacaactgaagcagtcaagtaagatcatttctgctctgtcatcctggtcccccacctcaatgcctcatcaggatagggagtgggaggtggaagaagggaggggacaggaggaggagatgaccatctccatcacttcaggcttccgagccagagacgagacgctttaactttaaatgaaattgaacattttgattattacttggatcagacacagacatacaactactcttcttgtgacttaaagagacctatgatgtctgcctaagacggcatgtcttagatggggaaggaagcaggtcctggagctaggtggaaaagacagtgggtgaaaggagagttgcttcaagagtgtgctcagctgagtagcagtggttcccaaactgatggcttctttgcagagctgtctttctcactagcatcttagcatttgtttgtgtccccagttcatggcatatatagtagatgctcagtaaatatctgactgtgttgtttttttgagacagggtctcaggtgcccaggctggagtgcagtggtgtgatcatagcccactgcagcctcaaactcttgaggtcatgtgatccctcctgcctcagcctcccaagtagctgggactacaggtgcataccaccacacctggctaatttttatttttttctttgtacagacaaaaaagaagaaaattgggtcttgttatgttgcccaggctggtctccaactcctggcctcaagtgatcctcccagcttgtccttccaaagtgttgggattataggtgtgagccactgtgcctggccatgtctgaatgttgaatgttgacagcttcagtgaattgacccctctttcacctatgggacttatgaagagagaatctttctggcattgcataatccttcccaagagtactttagctgtggtaacccttcttgttataaaacatgccaggtatgatgatggagatcagctgagctggacttagaatcttctctaagaacatttacaggcactcagtgttaacagcagggcagatgtaggtttctgggaacctgaggcttataggaactggagttcattgtaagaaaaagaatatcaaattatgaagacaaaattaggcatcaatgtgaatattaatttaggagaaatcacaacaaatcgcacatcctgaaaagctaacaaatactgcatacatcgcagaatctagaagcataacaatatttgtattggttaacttggacatatcactatagtatgctttttttctacattttgggctatatttttttcctattctttttggttgatgtccttgtagtagtggctacatgttagtaggcactaaccctagtagtaactaatcctagtagtagggttcatgttattgttgtcgatgtctgtattttgtgatcaaatcaccaagactgcaaatccttctttcaacatattcatatgattcactccccttcattaaattgggttattcaaacaattatgctccaaatttatctcttcctcttaatcaagtactactttggcatgatctgatttttataattattctctcttctcatctttattatttatattttcttagctattatgattcttcttctcaatttcatgcttttgtctatcaggctttttagcttctgttgtgatagaacaaaagagtttttgacattttgtaacttcttccagtcttttatctttcagtttttgtctgagacttctactaggatgttttcttctcaacacgcttgatttttgtatagttaataattttgaaataaaggcattctcaagagcagttcaaatgcacttgaaaattgctgaaatgtattgagttgcatattgcataatcaaattacttttttgccacatagactgatctattggtgagtatgtgtaggggtttcattaccctggagtcctttttctttgctttttttcccctttctttccatttctgtggcaatttggtgaacagtttcatcaggaagtgtgagacttcataagggcaagaggatcagatagatactctaagggtgatccgttcagtttgcacaataaatctgtggaagacatcatatgtacagtggaatcttctttctttgcagagaaaagtggacaagcatccaatttccaaatcaattcttgggataaattggtataacttgttggaaagcag

SEQ ID NO: 635 - DNA, 1699 bp, Homo Sapiens
gtatacatatgtaactaacctgcacattgtgcacatgtaccctaaaacttaaagtataataataaaaaaaaaagattctaaagaggaaaaaaaaaaaaaaaaagaaacgcctggggttttacgctgtcactccccagctctgagtgtttaggtaaacttacccctttgtgcccctgtttcctcacctgcaaaatgggcatgataatagtagctgtttcacaggatttatgcaaggattaaatgaagggatacatataaattccttacaaaagtgcccgactctctgtaattggtgggtctacatataagagtgttgttgcttagcacaatgcctgtcatatgagaaatgttccataatgtgagcgattactttgcttaatttattctcccccaactttttttagagtacttttggtggaacgttaaaagtgatgccagatacattttattgacatgcttaagtaagctcaattaatatgtatataatttattgcctctgccatgcctataatctaattgttcttttaaaggatgctgaggcgggtggatcacgaggccaggagatcgagaccatcctggctaacacggtgaaaccccatctctactaaaaatacaaaaaattagccgggcgtggtggcgggcgcctgtagtcccagctactcgggaagctgaggcaggagaatggcgtgaacctgggaggcggagcttgcagtgggctgagatcgtgcctctgcactccagcctgggcgacagagcaagactccgtctcaaaaaaaaaacaaacaacaagaaacaaaaaaaaaacttataacttcatcttctaataactatataacatttcaggaactatctttaggattaaggtgttataaagggtgattatatttcatgattatgttgttaacaattattatatttttattaattagtgaggattagagaaaagaaccccagatctaagtaaactaaagggaagtccagggtctctgattcttactctgatgcttattaactgtatgaactaagaaataacaggataatttgataacgaattatggattttaaaaatataattctgttttaagtgtagaagatggactggcaaggaagagatgaaaatagattggttagaaaactattgcaatagtctaagcaaggataaaacccttaactaaggccatagtaatggagatgaagagatggtacatgtgtagatccttgggccacagttaatcttcacaacttgccccttacttctagtggaatttagacaggcatagatccaaatggtggttttaccatttactagtcatatgattttatgctgcccataattcaatatcatcaagctttgttttattcatgcaatatagataaaacagtatctatctcatttaaaccattgcaaaattaaatgggatattctagataaagctccttttatagtgcctgaaacataacatggacttaaataagaaagggtaattattcttgattatgataaaactatcaagattctggatgtattttagccaaggcagagtaaaaagagaactgagacaagaggcagaaaatttacatttgaatcaaagtctgccactaaatagtggtttgatcttaggaaagtagagcctccattttctaatttgtaaaatgaagggcttgtactgcataggtagctctgaagttgaagcgatgc

SEQ ID NO: 636 - DNA, 1723 bp, Homo Sapiens
aggctcagtagaattgcttcagacatgaaataaagctaaaatgaatttgtgtccaatatcattggcattagtgctcattactgttgtggtgtaatgcctcaaaccatctaaaatcaattttagaaactaaccaggctcaaaaccatggttccctttgtttatctgcagatctgtcctgtttaaggtaaaattcaccctgggccctcgcccctgacctccaccaggtgacttttcatggagacattctcactgccagcaatccttcaactctttccacagaagtctgccaggaagagaaatgtccaaagtccattttgagctctcagcctgggatttagctgcaatttttcatggacactgggcaattactggcatacgaagccaaggagaagcaagagagggaaggccctgcttctctagtgagatcatcatctttgcatcagtcactgttagagacatctctggtttctgttcccagcctaactgcacagaaaagagatattctagcttctccctagttacgcatatgtggagaaaactgaaaaagatgggtaatcatggttgttgtaagtacttgggggctccagaaggtgtccctaagaactccataaagaggggctgttgtttctctgagatttaaacctttagcacaaaatggatcacagtgcagctgctggaagtcatccgaaggagctgaaaattttccaagcccacaccctcaattgcaacttgtttgagcaattttattagcaaatctaaagaaataatgctttgatcagaaaggagagggtttactcagcatggaagcaggacaaaaaaagggactcaaaggcaaatgttagcagggactgcccaaaccttgtccaaaagagaaggagctgaagtcaatcgacgggtaatttctaggcctcttgaaagatgcatctccaatacggtgtcagaaatcatagatatcacaagtctgtaatcaacagatttcaaggattcaggtcccctttgggaagaacatcccatcctatcatggtgccacttaaacacttagttttcctgtctcaattcaatgttcaccaaaccttgtcttcaggttgccttgttgctgctgaacatttgccaacagaaagtagacaggatgctgacactgttgtagaccatctctgatagtgatttcttattaaaaatgtcaatgctgtgttttgatcttatacatacatgctgtgtgcctgctaaggaggcttcccacagaaaagctgctgctgcttcacctcagcgtataccttgacacagttgctatcctgaaagcggttttttcttaccattttaactagttttaagtgaccagttgagcggcattaagcacattcacattattgtgcaaccgtcaccaccagccatctccactttctaaccaccagccaagggctctcttcaccaccaagccaactctcagggcagcagcaatgtgtaccttatctttccaacaaggacattatttcattttatggaaactgggagagatgttttgtcttctgaagtatctggagatttcttcttcattcccagactctttcatcatcaaaactacacagcttctcacggtcacttactttgttaaatttgtagtttaaaatgaacataaggaaaactacttctccaacaaaggatgcagagttcctgttgtgctcaactctgccagatcgtgggcttattgacaataggtttggaa

SEQ ID NO: 637 - DNA, 2337 bp, Homo Sapiens
agcccaggatcccttgcgccctgcggtagcccggggctgcccagggctgcgggctccaggcacccagagcgctgcgaccacatgaaaggcccggcgctcagcacccgccagccacctccagctggtttctaactacaccgccggggcctccatgcttctcagagaccagccttcgaagtgccgccttacacccggggcctggccaccgggcgggcgcggatggagctctggtccacatttgggagctcacagttgttcctgccagatgtggaagctgagacttaaagaagctatgaaacttgatcaggtcatgcagcgccagaggacccaaggtgggatctcaacccagactgtttggctccaaagctgaactgctacattacgttgcttcagcaaacagtcattcatcctgagagatgaacatgattccgcacagtgacttcagggtggcttattaaggggataaactcctccacctcttcttgttaagcatgtctgttcgacagtccaagcccaagatgaaaggcaagtggcatggctgaatcagcactttggtcccaccatgcctgccacctgttttattaagcgtgccagtgtgtcaagtgctgaggaatgaaaagaagggtgttgttgtcaaccgtgactttatcccctcactccaggccttccctcagccacctcagctggagaggccttgaggctgaggaaaaagtgccttccaggaaagcaactgcacacatttacctcagaaaataggaagcccccaagagcagtgaatgaaacattactttgctgtctttggaggccaatttccaggtctctccattttaaaatgaatgcagatacaaaatctcctcagtcccctgtagccgcgtgtgtcgtgtttgtccccttgggacagaaaatggtgagcttatgtcctgtggtgagcaagagccccccttgacctgaagtagcttccatccgtccctcagcctcccccttttcctttccagtaaagaaacccagttgcctggtacagtgtcagactttgcaaggctgttaacgacctataaaagtccaaagacagactactccagaaggaggaatcactgactaaggaaatcctgaatgccctaagcctgctcattaacaagaggcgaataataacagccaaagtggagaagctcataaattacccaaggaagcccaacgaagttggggggtggggcctgaccaatggaatccagggttcacttctggggttaatggaatcctggctggtccctgggattgcccaaggccaggcgtggtgtttccttcctgccttgctgggagaggtgtggaagtttgagggaggtgattattgcagagtcaccagcaaatcagggcgatacttgctctgggccacagagggaagtgggtcacgcactggagagtattagaactccaagctttgtcttggcgatgtgctcccagataagtaaacaacatccctccctttccctccccctactgggcatcttccactcccagtcatttatcacaggctgaagaaaacacattattaaaaagaaaaaggaaaggcggggaggaagacctaggacttctcaaacccctttccttccaagagctccaggctccatgctatgatcactatgagcttcccggacgggcttccacacccccagcaaactgggggatgagtttaatttgctttccattaaagctcctgctacttactaaagatttcacaacgtaatggctcagtataagcaaaatggaagccccaggcatgactcagcccaccttttcatgactcaggatctggaagaaattggagaatgtatgatcaaatctcgcctgtggcacatccagtacgaagaggtttcccaatgccctgatgtttgtgtctgtgtagacggtgatttcatcactccaccaataaagcctaacagtaccaacaacagcaaaagaatatggtagctgacccttatggagccttatccatcccaggcattaatagacacacacgtttcctcctccggccctcatgctaaactcaagaggaaacctaggctcagagaggtgacgtgactgcccagatcgcacagggtgagagccatggccaaactcggggcccagttccctaactgtaggactacaaccacattttggtgccatatttgatacaaactcaggtagaggttaagatcacgggccaaagagccagaaagtccttggagactgtcttggccgcatactttagggtgagtcactttgccttcctgagtctcacctgtaagatgggggaaataataccgtttgtgaggattaaatgagattcttcacataaaa

SEQ ID NO: 638 - DNA, 5478 bp, Homo Sapiens
catgcacatctagatccatactttttgggctcaactcagggttaccaaaatagagtcaaactcaactcaggattacctaaatggagtcaaattttgtgtgtggttttgtaacatgattctttcagtcatcatttccaggccacatttttcatgtcactcatgactgcattataagtttgtaccataattcatttaaccaatactctgttgtgcatttagaatattttcagatgtttattgtccttataaaagtcagtatgaaggtatgcaattatcacttaggccacattcctggaagtaaaattgttggaatggaaactatgtacattttacagtgcagattgctggaagagttttatgcaaaaacttatacaaaaatttacactcttaccagcagaaagcctcagcgccactgagtgctgttgtattgttaatcttgattaatctggtatgtgaagaaggatgtttcaatgttttgtctgtgtctctctgattattttgcttgttgattggccagttgttaattctgtctttgtgagttgtctttttctcagtacttggcctatttgtctttgatttgaaaaagctctttatgttgtagtcattttaattcctgtcatatgttttgtaaacaatttttcgagttcataatttttcaatcttgtttgtattatattttgccacacaaaaattttaaatttgtatagtcaaatttatcagtctttttccttatgttggaccttctaatctcaaggtactaaatataatctagcatttttttaaacattaaaaatttttaatccatctataatttattttaggatagggagtgaggcaggggaaggtatctttttaaataaaaatcgttgctaaatggttggctagttgtcctattaatagtcattgagaccaggagcggtggttcacccctgtaatcccagcactgtgggaggctgaggtgggaggatcacttgaggtcaggagttcgagactagcctgggcaacatggcgacacacaatctttacaaaaaataagaattaacagaggccaggctcagtggctcacgcctgtaacctttgggaggccaaggtgggtggatcacttgaggccatgtgttcaagaccagcctggccaacatggtgaaaccctgtctttactaaaaatacaaaaattagccaggcgtggtggtgtgcacatgtagtcctagctacttgggaggctgaagtgggaggaccccttgaacaggggaggttgaggctgcagtgagccatggtcatgccctgtactccagctgggtgacagagcaagaccctgtttccaaaaaaaaaaaaaaaaattcattgactgtttttttctgttagtgatttgaaatcatatactgaatcatatgctgaagtctatttctgaacttcttcttttgttctactgatctatttctgtgccaataccacctactgtaactttaaaataggtttttgtttataccaagtaagaataagttaccattatttttccattaatttttttttttttttttgagacaaggtctcactctgtcactctgttgcccaggctggagtgcagtggcatgatctcagctcactgtaacctctgcctccctgcttcaagctattctcccacctcatcctcccgagtaactgggactacagatgcgtgccaccacacctgactaatctttatatttttagtagagaggggggtttcaccgtgttggccaggctagtctcgagctcgtgacctcacgtgatcctcccgtctccgcctcccaaagtgctggaattactggcatgagccaccgaggctggcctgagtattctagtttataacttacaaggtcattcatatgtatatgttgttgtgcttgtctagctattttatattttgttattctgaactcttggcctctatctcagctccagcccctgaaagtgcaggagtgcttttgctctgccagtcggccttttttgggaaatcatatcaagatggcttttccagcacaattacttcctagagtgtctgcttgatgcatggaaactcatagatttttggcatgccaaacagagggttttcctgccgtcactgctggctccagccacagacttcagttttcttacctgttagagcctttgtcctctgactggtggaaatggagcttgcttctttttgttttgcctgccactagtctggcagcctccacctcttgacccttgggtttcttatccttggaatcagatacgaggccctgtgtcttctgttgctgtagaggacacaagtcatattctctgagtggagatctctctgaagctcctctttccaggcttgtactgagggacctctggaccctctaccacgtggtgtcaaagctgccaagagctgtcatatgctgggtctgtaaattgactttctcacctctgaccagatgcattcacttgagcggcacagagatttgggggagtgaaagggcactgtttctttgggtccgtgggcttgtgtcccatcccctagccttggggttagcaggattcagaatttatgagtgtggtctgcaaaagtctacctctaccagatgggggagaacctagtgtgtggacctgaagggttagctctgtgctttagtccctgggagtggccatcttgagtcttggtgggcttggcaagtaaggagacattgaccagattcaaagcttccagaggtggtgagaactccagggccgagtaatggagagtacaaaggtccttcttggcccccatgacccttccaagccaagaacttggcagtagctgtgagaagcagagatagggagaggaggtgaggggcacctatagctcttagccatgagttatgactccctccatccaagggagacccaaggacatgaaaggggactcagttccaaggatcagagggaacttgggttgttttgggataatgactgtggcttgggatgtcacggagatgaacaccagaattggtgtgcaacagatgagctccagtacccctgatagtttgcatgggttttgctctgctgatgatggtcagggacagcagtgaggccctctacaatgccgccttctgcctaaacacaggcagtgcccacaaaaggggagctgtcattatggagcctaggaatggatagtcagagagcagcggctgggcagtgcaactcctgcattggacaaggtcctggctagagaatgtcaatgtccacactgcatgtagccctatcgaggagatgatgtagggggctgtcagccttggagactctagcctaagtaccccaccaccactctggctggcttccaagggcacaaatcagctttctgaatctgacttggcttcctgtgatctgcattcatgaacattcttactagagttctcatggaaaatgaatacacaactatttggtctgaatgtgtctgagtttggtgtctccaaaacaattctctggattagatggagaatgaagaaacttcacaaaggcaaaaggacaggtccccatctcgacccccagagaccacttctcagagtctctatctgttcgtctctggtgttagccacgttcctttactttccctcatttctgtggccactcctgtggcttcctctctttcaacctgcaggctgctgctgccctgcctcagacccttgtaggcttctgtagagatgctactcagatgggggtggagctagatgcagagctgaaacccacctaggagatctagcttggagagcttgtgaatcttaggagagctaggcatagaatgactaaagtttgtcaccgcatgagataaaataaatgaaaagccacttctggagggaatgaggcagtctgcctttattggagagatacatattgttgaacagctctgggcagttgattgtgtgcctgggagagctaaccatgtttactctacacttgacctgtgatggtctgtattgattgtatcacacgcttagctttctaaggctaaccaggtcatcgtcctcagtccctgcctgcaactaggttgccaactggcccttgatttcccacccaacttgttcagtttgccctcaatcctggggcctcactaatttcccaaaaagatatggttggtaccacctgtagtttgctgttgcatgttaacctgacttttgggaaactcaaataaacacttttcaaacgcattgaccatttttactctatgacttctgctttgcatgatcgctagcttggtcacccatcatgctgctttctggtgagctgaaaggaaaataaatggtctaaattgagcaacaagaaagtaaacttttaagcaggtactttccaagtgaaatgagaaccggagattgggtccaaaagagaggatgcccagccagactgaactttcaagtgttttccaactggaaagctccaatgtcctctgatctcagtgaatttccaatctaatttcaaggaagtccctcaggagccccattgcaagggtggttatagaaccatttacaactgctttaataaaactaatgcttataaagaaagaaaacttgttttttagtcatccataacacaaaaaagtgaggtttgatgcacagtaaaaggaatcattatttaagttagtctgagttatattgtattttggaaatgctccacattcaatatttatgccacatactctaaaaccaaagtatgtagattaaaaaaaaactatttccagaaataagcttgctgaatcaccacaggcttaatttatttattttaactaccagtttcctgaatgtttttgtctaattggcctatctgcagttgcccttggtccacccttgagcccactctttaagcctgtctgtcacttagagaagtacaagtacttcctgctgagaataaagccttgatcgcaatttcagtgaattatcagggaagtgtgagaataagtaggaataaatgtctaaacatttgggaaaaacttgtttgcaataaatgtggttaacagagagtgaataggcttactacataaaattgttactcatcaattaaaaaaactgtacaatcctcctccgggggaaaatgatcagatattttaagtctgctgatatttttctctggatgtcagacctgtatactttgtcctgcattattggagtataattggcaaataaaagttttatgtatttaaggcatacaatgtgatgatatgatacacctatacactgtgacatgattacctcaatcaagctaattaacacatccatcacctcaccttttttgtgtgtggtgagaacacttagatttactcctatagcccatttcaggtatacattattaactctagtcaccatgctatacattagatctccaaaacttattcatcttgtaactgaaagtttgtactctttgaccaacattcgccattcctccccaacccctaactttggtaaccacccttttgctctctgtttctatgagttcttctgtttc

SEQ ID NO: 639 - DNA, 2409 bp, Homo Sapiens
cgtccagtgcttttcctgtggagggtgtttagagaaatggcaggaaggtgatgacccattagacgatcacaccagatgttttcccaattgtccatttctccaaaatatgaagtcctctgcggaagtgactccagaccttcagagccgtggtgaactttgtgaattactggaaaccacaagtgaaagcaatcttgaagattcaatagcagttggtcctatagtgccagaaatggcacagggtgaagcccagtggtttcaagaggcaaagaatctgaatgagcagctgagagcagcttataccagcgccagtttccgccacatgtctttgcttgatatctcttccgatctggccacggaccacttgctgggctgtgatctgtctattgcttcaaaacacatcagcaaacctgtgcaagaacctctggtgctgcctgaggtctttggcaacttgaactctgtcatgtgtgtggagggtgaagctggaagtggaaagacggtcctcctgaagaaaatagcttttctgtgggcatctggatgctgtcccctgttaaacaggttccagctggttttctacctctcccttagttccaccagaccagacgaggggctggccagtatcatctgtgaccagctcctagagaaagaaggatctgttactgaaatgtgcatgaggaacattatccagcagttaaagaatcaggtcttattccttttagatgactacaaagaaatatgttcaatccctcaagtcataggaaaactgattcaaaaaaaccacttatcccggacctgcctattgattgctgtccgtacaaacagggccagggacatccgccgatacctagagaccattctagagatcaaagcatttcccttttataatactgtctgtatattacggaagctcttttcacataatatgactcgtctgcgaaagtttatggtttactttggaaagaaccaaagtttgcagaagatacagaaaactcctctctttgtggcggcgatctgtgctcattggtttcagtatccttttgacccatcctttgatgatgtggctgttttcaagtcctatatggaacgcctttccttaaggaacaaagcgacagctgaaattctcaaagcaactgtgtcctcctgtggtgagctggccttgaaagggtttttttcatgttgctttgagtttaatgatgatgatctcgcagaagcaggggttgatgaagatgaagatctaaccatgtgcttgatgagcaaatttacagcccagagactaagaccattctaccggtttttaagtcctgccttccaagaatttcttgcggggatgaggctgattgaactcctggattcagataggcaggaacatcaagatttgggactgtatcatttgaaacaaatcaactcacccatgatgactgtaagcgcctacaacaattttttgaactatgtctccagcctcccttcaacaaaagcagggcccaaaattgtgtctcatttgctccatttagtggataacaaagagtcattggagaatatatctgaaaatgatgactacttaaagcaccagccagaaatttcactgcagatgcagttacttaggggattgtggcaaatttgtccacaagcttacttttcaatggtttcagaacatttactggttcttgccctgaaaactgcttatcaaagcaacactgttgctgcgtgttctccatttgttttgcaattccttcaagggagaacactgactttgggtgcgcttaacttacagtactttttcgaccacccagaaagcttgtcattgttgaggagcatccacttcccaatacgaggaaataagacatcacccagagcacatttttcagttctggaaacatgttttgacaaatcacaggtgccaactatagatcaggactatgcttctgcctttgaacctatgaatgaatgggagcgaaatttagctgaaaaagaggataatgtaaagagctatatggatatgcagcgcagggcatcaccagaccttagtactggctattggaaactttctccaaagcagtacaagattccctgtctagaagtcgatgtgaatgatattgatgttgtaggccaggatatgcttgagattctaatgacagttttctcagcttcacagcgcatcgaactccatttaaaccacagcagaggctttatagaaagcatccgcccagctcttgagctgtctaaggcctctgtcaccaagtgctccataagcaagttggaactcagcgcagccgaacaggaactgcttctcaccctgccttccctggaatctcttgaagtctcagggacaatccagtcacaaggtatacctgtatatattttggatgactattctgatgtataatttctttttcttactttaagtggttgaaa

SEQ ID NO: 640 - DNA, 39996 bp, Homo Sapiens
aggccgccctgctagggccggagggaggtgggcacgccgggctcgggaccttcccggggtcctgcgcccgcccggcctcccgccctgggcatggttggcccactcctcccgcagccaccaacctgacagcccccgagggcgactccgccgacagaccgccatgcaccgggccccgccaccagcgccggccccacaacccgcctgcgccatagcccgcccgcccgcgcgcagcttgcctcgcgcgatatccaggttccagggccgccgcactttcctttcctcttggcgcgcctctaccgggccccggaacccgtatagaaaataccgggcacggtccaccccgccccccgcttcgccgcggcagccatccaacttatcctggttccggggctcctggagcccaggcggccgggatctgaaccgagctcttcggagccccgcccccaccaaggccggggtgacgcatggccagcgaggctgagcgcccagggaaggcgtgctgacgtcacgacgcccgggtcagggcctgggcgcggctcggagccgggtcgtcgctatagcaatcgggaaccgctacctgtccattccaaggattcggtccagcagaagcgtgaggaggtggcggaggccccgagggctttgcgtcatcacttctgcggcctgcgggcgagaaggtgcgcttcgggagtagcgcgggaggacaggaggcgcaggttgtgagggacgcaggccctggggcttcggtctctgtcctccgagctcagagcctccaggcttcttcccggccgcgcgctcagcactcactgtcttacggtcccgaagcgctttaaggtgcgcagtccgcaggccttgcctactgatcttccagccaccccttgaaggaagcagttgcaggtattaagagctccttattgaaaaggacgatgtagaggggcggtgagggactcgcctccgcagggagggcgccctggcggtcttctcaggttctctctcattcccgcgtcagctccaccgtcaggctcgaaaccgactactcccttttgtaggcttgctttgggttgaacataaaaaccaagcccctttactatttccctgctgggaggggctgcgattgggaaattttcagaaacctgagggaaaattaaaagggagcgagctttcggtaaaaaatcaaattaaaaaggaggggcgttagagaaggaactggtaaagattgccttttaggagaggaactgggtggctggaagaatgaggtgagaaactttcccctctctatcctttcagactttaactggtttcttttgtatcttccccgccccgaaaacaatttaacttaataagaataatttttaaaggacgtaaactagacacagttacaaagtacggggtttggggcttgtggtagctaaaggtgtctttggggatgcgggcatccttttcctctcctgcctgaagagcttaactagaaagcccccctttcggtcttagacatcccctcttcctgacttgttctggctgggaccagagttcagtttaggtaggccagtgagtgacatttgatggttagaattcctacggttagaattaatcccttctgtatctcctagtatggaaataaactgcctggccactatgctgccctctttccattcctttttggtggaagtttgacaagttatttcccatagaaaataacttataggccgggcgccgtggcttaaacgcctgtaatcccagcactttgggaggctgaggcgggcggatcacgaggtcaggagttcgagaccagcctggtcaacatagtgaaaccccccctctctactaaaaatacaaaaaaattagctgggcgtggtggcgggcgcctgtaatcccagctactccggaggttgaggcaggagaattgcttgaacccgggaggcggaggttgcagtgagccaagatcgcaccattgcagtccagcgcgggcaacagtgtgactccgtctcaaaaaaagaaaaaaaaaaagaaaaagaaaaagtaccttatagatacagagagaagattaagtagctcctcttataatatgaattgagggttagaaataccgcagggaatagaactcaggctgtacctgagtttgtccctctccaaccaccctttttccatagctctctctgtatatatatatctgtcttttctcacattccttacggatcgtaatctgatggccagtcacctctgcaattatacatttaacaagagctctgggaaacagtgtctgaatctgaagtaatgatcctaatggaaggtaatttcaggttctcaggagaattggtgaggatattttggagggcagtattgaagaccattgctagcagtttctctcctatcccttccactcaacatataggctggtgatcttcagacattttttagaatgaacccataaaagaattttgaagagctatgtacctcttgttcatttttaagttgatacctaaattttccttcattaatttaaatacttatagaggatacaatttcaaattttgacatcttaaactaagacttacatcattctttttttctgagacggagtctcgctctgtcaaccaggctgagatcgtgccactgcactctagcctgggctacagagtgagactgtctcacattaaaaaaaagtatccggtggattccaagtaccctaaaaatctaatgcctaccatcatccacttaaaaatatatgaacaagctcttcaacagaaattttatatggttctctttctccttatactttgaattccattcacttcctgtaatcattagtatataacttactaaactttttttttttactaaatattactaaatactaaattttcctaaatatttttaacatttttatgacttgtgaaacctaaaaagtacaatttttattgaaaatgcatctgttaatgagaaatatggtgtttctccccaattagttcaggtattcatggattaatattacctaatggtagaaggagataaggtgcaacatcaatcctttacctgttttttatttttatagacatgagtattgagaaaccttgtttccacaattgggaaaggaagagatttgttacaatgatattctttgagtctttgaacttctaaattatatgccaacaatcacagagtgatctattaatactatcaaatagagtcttcttttaattttgttaaaagcaaaggattagaaaccactgaacttccaaaaggatttagttattagagtctcagttttggttttattaaacatgattattaattatctgtgacctttacactcagagacactttgttaatcagatattgatttccatacttctttgcctacacaatattttttggtaaaattctttaattattacatgtcttcaagaactttttgttaaactgaaatgcagattcagctcattcactgtatagaaaacaactgccatttgtggaattggcaaagccagttttcatttcaaaccaatcagccaaatcagacctactttctgttagaaacatgtctgactttattcttccattcaaataaatatgttaacattcattttgaggaatattataaaaattattaggaaataaatgattaactatagcttataaaatggaccactgataaaccagtcaagattaaaattatttagacctactattaacataataaatggtaaaaataagatagtactgtttttcattatataattaggaataatgctgtataatgtatagttaaatccatcagttttgagaagtcatatagaaggcatatattcccttggtaaatgtgtgtgcctgctttcatcaaactcttgttgttcagcttttgggaacaattaaatgagaatcatgtctaaaaatcagaaataactaataatcttgttacacaaatttttttcttctgtattttttagaaaggaaagctgtatttgctaagaaataatgaattgagcagctagcaatttcactttttactaggaggtagaaaataataaacattttatataagataaaataggaagactgattgcaatgggaatattttgatatgaagtggaaaataattgctccctccaagctcctcaggtttttacaccctggaccatgcatcaagattcagtgtaggggagagacattcctttcttttgtaaagtaggacaaggactatggtgaaagtgggggcagtggtagagtggagaatgtgcatgaatatgtcagctggctcccaaatggattggtttttagaatttttttttttttttttttttgagacggagcctcgctctgtcacccaggctggagtgcaatggcatgatctcagctcactgtaacctctgcctcccgggttcaagcgattctcctgcctcagcctcctgagtagctgggattataggcgcgtgccaccacgcccggctaatttttgtatttttagtagagatggggtttcaccttgttggtcatgctggtctcaaactcctgaccttgtgatctgcctgtcttggcctcccaaagtgcggggattacaagcatgagccactgtgcctggccgttttttttgtttttgtttttgttttttgagatgaagttttgctcctgttgcccaggctggagtgcagtggcacgacctcggctcactgccacctccgcctcctgggttcaagcgattctcatgcctcagcctgccaagtagctgggattacaggtgcctgccaccacgcccggctgtttgtttttttttttttctgagatggagtcttgctctgttacccaggctggagtgcagtggcccaattcagctccctgcaacctccccttcctgggttcaagagattctcctgcctcagcctcccaggtagctataattacaggtgtgcactgccacacccggttaatttttgtatttttagtagaaatggggtttcactatgttggccaggctggtctcaaactcttacctcaggcgatccgcccgctacagcctcccaaagtgctgggattacaggtgtgagccagtgcacccggcctggttttagaaaatattttatagggaagttgaggatctggaaatttattcctttaaaactctcctcagactgatttgaggctatttcctgggtattccttgcagtcttacgtaccctaggaaaaatcttcatttaccccacttggaagacttcttaatataggcatatccaaactccaatgtccctgactatccattattttgagacaccaaagcaaatgtcctacgaagtaaggaggaagacgtgttgttcttagaatagaagtgagttatgagagaagtcaaagaggatggctccaagttggtatagtgtgaaggtcatggatatggtccttggctttgcagttctagaagtgtgattttgggtcagtccacacaaaggtgttcatgttttgtcacattaaatcaaactcataggaagttaatgtacataatagaatgccagtgcattcttttatacttacagccaccaagtgaactggattatcgctcctgttgggtaaatcttatctgggaagatcaattataatcagaaagttacatgaggagtgtggatcttgagcatggctattgtcaataagctgatgagcaggtgctcactacctggcatataataggatctcagtaattatggaatgaatgtacttcatctgtatcttcattatagatgctaaagggtaagtttaagattctgataggccaccccacatgttttttgatcaggtagatttttccttgttgctcaagttatactcttaaatggctatatcatgtagatattaaatccaataaaatttcatgaaagggaattatataattgcaacagcaaagttttatctatatctctgagcctagaaattgggactgttcatttataatagagattggagattgctttctcctgccctgtaggagtagtgatggtggtagtgactaaatgatctgtatttcacaatactatttggtggctaagagtgtactgcatacaaagaatgacactgggtgaccctcagtgctggcgctttcctagaggtgggacatcctgagtagggaggtgctgaaccacctgtgggctggccagctgttgtggactgtactgtggagaggaggaacaataaatttcccccactccttagatccccctcaggagataatacttgatgctgcttttaaggacagagaaaagacaagccttttcaaattttaaaatcattagggatgagttgccaaaaaatttgggttaagttttatctggaagccagaagacattgtctcctcaaggctttttctggctctgggataagctattgagatagaggaaaagatgccgggctgaggagtttcatttagtattttaataataataaaaaagacatacaaaatccaaacatttctttttacaattcagatacatatttttccccaagtgcaaaatactctatgaactgcatcatttgctgtttattgtcgattgtataggagatgcttactaaattggcagcagtggaaggcagatataaatacaatattttgaaatttcttctgcatttaacaaaaagcctcccacatggcgatgattattctgaaacttgagttcagctcacacagaagtataaagttttcagtttgttcaaactgctacaacctgtggtgtctaaaaaagctgatgacaactgggggttctattccttctaatcatatatttccttgtacaaataatggcacaaggatagggtgtgctacttttgagacgggtcaaatgtaaaaatatccttgtgttgttcgctcccacttttattgtgcttaagaaagaaacctggagggttaacattttctgcttatgctcagttatactttgtcttggtaccccttgtttgtggctgtaatattgaggttaagcagcaaatacaaaagttcgagtgctctataacgttttctgacattttgagatatgacctcataatccattccagagtcacctcaaacatgtatatagagaacacttctcatataaaaagtttctctagggccaaagaccaggactgtgttactgaactttcagcaacaaatctgagtctccaccacctcaaactgaccaaatcttgggggctgttaaagcagtcacagctcagtgccagcctttggggatttctaggcctggagcaggcagctcagatccaggatctggtcagttttcttctgactccaagagttgtctcaggttgtaggaataggcatggcctgataatatagaaagagggaggcagagaagtaaagaggaactgccatgttgctgaggatataagtgcctttctggtgtgcattacttggtgcgtgaagccctcccatttccaggctcagagcaggtgaggttttgtactaagatgaatggaagccccacaatactgtcgccccacaccctacacgctgcagagaggcctctgggttgcttcatgaagggatcctatttataccatctttccatttccctccaatggtaaaaacctctcttctgtctgacctgtaaagacctagaatgtccctgagcgttgactcctcattcaatccagttaacccctagtttgatgtcccagggccagcctcctccatagattcagcagcagctttgcctgggttcttaaccctccaacttggaggacctaaattaaacttggtggacaatagcaggtttttacctgctcaccaagatctgccttgacatcaattaagaagcctagtggtctatgccttccgtactgtggaactcatttgcaggtctcataagccatggaataaatggttgaaggatgtgtatttgtatgtatgtatgcatggtgtgacaggaaaggaagggagaaaggagaagccagaccctgaaggcataaattaagaagcatggtcaccgtttggctttccaagagacgcaaaacggctggcagagaggaatcagaaagttatcctaggctgggcgcggtggctcatgcctgtaatcccagcactttgggagactgaggcgggtggatcacctgaggtcaagagttcaagaccagcccgggcaacatggtgaaaccccatctctactaaaaatacaaaaattagctgggcgcggtggcgcatgcctgtaatcccagctacttgggaggccgaggcagaattgcttgagcctgggaggcggaggttgcagtaggccgagatagcaccattacactccagcctgggtgacagagcgagactccatctcaaaaaaaaaaaaaaaaaaaaagaaagaaagaaagaaagttatcctagcttctggtggagaattaggatagtcagagttgattaaagcagttttcatggtgcttcctgggaagtacagagacactcatactaaatgaccatttcccttgtttggaagcagccattttgcatctttacagtggccctccttgacccagaaagacaaaggtagccagacactctacccacaaggaccatgatgttggctaatggttgtcagggaatctagctgtgtcattggctacctactgctatggccgttttggctgatgaatgctactgatgggagggcagggagtcagactcctttatttagtgttgagtctcctgggggagcagtagcctaggacagtcacctagaaatgaacctgagctgttctgtgagttaccaggagagttaaaaagaaaaaaaaaaaaaaaagaaatgaacctgaggactcagttggtagcctttgattgattgggactacagctttgggggaactagagtgagaaaacagaaaataattttataggcaacacttggattaagggcagaatgtgtgcaggctttgggcttgggcatggacttgattcttcttccatttgattctttcttccttctgaaaaacagtagttgaggaagctaagcttgaagtcaacttcaaagggaagtgaccagagccaggcaaatatctgatgccttctgtcttattcttggctcccacagctttgtctctggcctcgggaccctgagtcagcccatccccaggtggtatgtcctggtcctcttccatgtgtacaccaggggataacaggatgaagacagggaaaagatggaggttttccctacttggggtagagaatcactgaccagttccattggcctctataatcatgaggtccacactgactccatggagaggcatagggatagcaagattggtttagcaaacataggtctctctcctttctgctccatcaaatccccagaattactttcctacacatcagatgcctctgcgcaattaccctggattaccacagccaagggctctaggtggccagtggtggcatagagacagatcagatgctccagcactcaaggttcatgagattcaaaaccgattttcttccactccaaacatacactcttttctcttgggcagctataaatagggttttgctaatagaggaagaagaaacaaaaacaaaaaacaaacccagaaaacaaaaacccctccgtctagacaacatagaaagactcaaaatgattgcacttattaggtgtggacagggtgggcaggaggctcgccaagtgcacacacattccttttgctgcccacagcctgaggccagaggtaggtggctccaggctggcttcagagtggggtcctctttggtgaagcccacaagccagctggggctacaagggaaaaacaactgtagggcaaggcctaggctggcttcaggtcaataaccatgtttaaggacaacatgtagcaaggggagtagggctcccccagggagcatcacatggggctgaggaggtggctgggccagggaagacaagaaaagggattagtgtttgaagttgacttccaattgttctgtgtctagtcctttagatgatacattttttctttctgttttcttttttttggcaatgctttaaaaccttgtttctgtcctgcagagttacagtctttctctcagggagctacagcggggcattcaccatgacaatgcctgctgctcttcctcatttagccggtgtccactaactcagtgttgtgggccatttgtaaacccttatggagtagaccccaggcagacgtagggaaagaaagagaggatctgtatagacaagaaagctggccatgtgggaagtccagagctcaaaccatgtgccccagaggactggtgctggcattaagcctgtaaatcaaaggcttctttggcaggaccctgggctgttagaatcaccctagggagcagagccaggggacattttggcccctgactagcaaggcacaaccctataatggcagaagcccttctttcccctccccgtttcccaccagacccacttccttgatgggcctctagcacccttccaagctgatggggtcgggaatgtgagctggtaaaatgggcagtggaaggggctgtactgtttctttacatctcacggggactagagccagtactgaatggcttttctaggtagtgtgttagaaaagggggaacagtagagaggcaggcagagagagacaaggaaaggaaactagaaagacagaaagggagagtgcctggtttgtgtagtgatattttttttttccctccaaaaagagaggagagagttccttgtctgagggtagggggctgccggctctgagggctaaggagtctgggggcttaaaaaattgggtctctgagcctagggttactatttgtagggcctcaggaagctggaaactttggagcggagcagcttgatgaaggattttggcagcatctccttgtgtttctctgtgtacttgaagtagttctgggggtgggctagcacctcaaagaaggccttgatgagcttcttgtcctgcaaaggatggcagggagcaatgtcagcctcaccgtcgggggtgggaaagagaaacaccatgactcagcagcccttcttgatgtctactaggcatcctatactgaatatatccagagggcaactctggattcccattcccaccatctgcccttattctggaattccacaactgaatcagtggcagctccatccttctgttgcttaggccccaatccttggagccatccttgaatcctctttcttgcttacaagtatagcaaatcctattgactctaccttcaaaatatgtctgggtctgaccacttatcatcttcccaagccaccactgtctctgacttggagtactgtagtagcctcctaactggtctccatgctacctttgtccctccgtagactcttctccccacagcagccagagtgactttttgtgtttttaattagttcatctttttcctgtttgaaactcttctctggtttcttttatcactcattggcagaatgtgatctgtatcttgctttccacctccactcttgctccctctgctgagccacactggccttctggaggttcctgaacacactaaattgctcccatgctccttagcttggaatgctcctccctcatcttctaatggggagcccttttacctcatttgggtctcttctccttagaggcctttcctgaccaccctgtctacaacagtagcatggtatgtggagagcctactaggtgccaggcactgtgcattaaaactcaggtcttctggctcctaggctggtgctccttccatggcgtcagtggatttttcaaataagaagtaggggtttcagcctcttaccccactttaatcagaacagctgcactgctttatgtgttggaattccacagtacatttgatttgaaataagggttcagatgctttaaaaatgtttgaaaagtattattaaaagtatattctttgaagtctgcaagttctaggtgatttttgttgtcaaggcttttattttgatgataatataaaaatattttgctaacacttaacttttttgcagtgataatttatgaaggataattctatgactacgactatagtttccttttttttttttttttgagactgagtctaactcttgttgcccaggctggagtgcaatggcatgatatcagctcactgcaacctctgcctccccggtccaagcaattctcctgcctcagggtcccgagtagctgggattgcaggcgcccgccaccacacccagctaattttttgtatttttttagtaaagacggggtttcactatgttggccaggctggtctggaactcctgacctcaggcgatccacccgcctcagccccccaaagtgctgggattacaggcatgatccaccatgcgcagccagactatagtttcttaaggaagattttcttaaattgggattcaccgacccagggcatctagtccattcttccatgttggaagtatttattttccttgaaaagaagtctgtacataaattgattctgagaaagctgtgctagatctgccgctgctttttttgtttttgtttttttgagacagggttcactcttgtcacccaggctggagtgcgatggcgccatctcggctcactgcaacctgcgcctcctgagttcaagcaattctcctgcctcagcctcctgagtagctgggattacaggcgcctgccaccgcacccggataattttgtatttttacaaaattaagacgaggtttcaccatgttggccaggctggtctcaaactcctgacctcatgtgatccacccgcctcggcctcccaaagtgctgggatgacaggcgtgaaccaccacacgcagcctatctgctgctgcttaatgaggcctggggagagaataggggaaggaagggacttatgcaaaagtatctttctatacttcactttccctatgtctcttggaagaggtagggacatttcttctcctcactttccctttctcttccaagttttccccaaggtgtaatatagtgtgggtgacgctgcagtcggataggcttgggctcaaatcccagcttcccatggggcaggttctttaactctctataccccagttttcccatctgtaaagaagcaatggagaaagcacctacctcatagagctattgtgtctatcaagtgagaatattcatgtaagcacttagcctattgcctatatattgttacatgcttattaaatgttagctatcattattgttaatattcattcacctttaaaatctcctggtggttttcagaggcatagagccggccatctcgcacaatgtcttctaccagctgctcatagtcctctgcaaagtcaaccaaggtgaggggctcaggggcgggagctcttcctgctctcctggttccctctcaaaactgacatacctccccttctcacccacctccttggcttaccatcataggtaacatagggaatctggaagccacgggcgctgttggcctcgcttgtcttgaagttgatccagagcttcctggaacgggcagtgaaggcaatgggacgctcgtaggtctggcaggtcagtagagcagcagggcaggctacccaagccctcctagaacgtgggctgtacagctggtggtgggggtatagggcaagagaatcattctgacaaaggctcccccttcgcatacacacaccctaccccacaccctctcccattgcccactgggctcattccacaattcctccttgatacctgggcactcacatagtgtaataaatatgacatttaaatgaatggaatggcaaaaatgctaggataggaaagtgatacatgtaacgccattggagttctagccccactgctagctttcttaactctgttttctaccaaacatgtgtcattgctgttttcctttgttagcttctctcttcctaaaggcctctcactatttcaccctcatagatccctaacttcactgccccatttcttcctgtatcagtctctctctttgttctccgccttaaccagatttggactgcccttccctggcccagctctgcaagccacccacagttctttctcatgacgaggacgtccccacactcatcctcagatggcaggaagatctctggtaccacgataaggatcttgcgcttgggtggggggttgatgttccagatgcactccacaccagctgggtagttgcccgggtagttgggggactcaatatagccagtgaactcacccagctccccaccacactgacgatctgcagccaaaccccagtggataaaacaagacagagaagggaagtcagtggggaagtgtgctgggggaattgaagagttctgaagtagaggtcagacatttatgggaagtctgcgttctagttcatcattattttccaagctctgagtccatcttccttcctgcccttttagtaccttctcttctcacttcacctgtctctgcttcctcattaactgtctccagggagagggtgttacagggtccagcctagcaactggccttgagattgagtgagttggggagaggtggaaggtggagttttcctgctcctccaccccccagccctgctccctgttggtttcacacccctcctttagatgtccactgctcccaggcctctctcctcccttttgcacagcctggcttgccacgtactcttgcattgggccacactggtagagccatcaaagtctgtgcttgtgtttcctggacagcggctgcagaagttctgacggaagtcgggctgataggagcccatggcacagcgaatacagcggtggatgctggtgttgtagtagtgccctggggagcactggactgtaggcaagggagaagggcaggaatcaagatggtaggcaggtgggagttacggggcatgggatggacaggatacattcatcctggagaatcaggagatcagatacatcaaagttcttttctagggtctcaatctttcccagtcatgccagaatttaagcccacggaaaaacagagtttacagagtggttggctacagtgccaatccttttctttcagacgctgagcacagtgccaaacctatatagaaactcatttgggatatggaggagaatatgccaccagttctccaaagtggagaggtgaagccatgcctccctttccctcacctgtgtaaactgggtatgaagacagaggacaccaggaaagaagccagagaaagaggaacagtgatgaaggtaaggatggagattggtcacattggtcggataggtaactgggggttgcagctggttgcaatgagcagccagggaatgtaggaacctgggaagtggctctgggtgcaggcagagctatggccatggtgctgaggttggaggggcagggtggggaaaggcagctgagcctcacctccttgtggagcagggaccatttctgtggacaggccacagccctgtccttcctcccctcccccctgtgcctgggcttgctgccatattccctagcctttctcctattttggcttaacaaaacaaagtctgacaacttggcggggagggatctggggagagctgccaggccacaccctagatggtgggggtggggggcagggagaacagtaggctctcacccccaaatcaccacccctaggttctagagccaagctcaccctggagcccccaattcaacaccttgattccatctctatgctagctactgccctcccaagtccatggcccttctcagtttgccttggcccaggaggcatcacgtagattggttgtcaaatggagcagctagaatctgggctcctgagggcttcatctgcccctctcttcccatcctctctgctgagatcctgcaaccttctcttccccttctggccagggcagagaggcccagatccagctggctcttgcccaagagatgcacctgttggaagagctaaggtgtactttcctgtgctttgctcctgtctctaccctgtcttttgctgttctcttgacttctccccatccctgtcttcctgctcttgccacattctacatgccatccttctgtctgctcccttactatctaaccttgtggctttgctactctagccaagctctttcctccaattctcagtggggaagctaaggcccagagcatggacaactttctcaaaattcccctaagagccaaaggtagtattgagactttgaaccctaaccctaggtaatctttgtcccttgaccctctctatacctaatcattctcttgtccctctggttggttctccccaaaacacttatagggaaatgagatgtggtgacaatcaggggcctagaaaagtcaaaggcagccaaagaactcagaagcttatgtgcatgtcctgtaggcaactcactgtcctggtctaagtgccacagcttcccttcccaaaggagtttcataagaggccctcaagggtgactgggcagatatgaggcccttccctggaagctaaaatggtaggagaggtgaccagggctgggattaagggcccagcagatatcagggtttggaggccagggttgggtgtagaaacctatagcctgggtccaatgatgggttatgactaggtttggaggcagctctgcagtaaggaggctcttctcagccaataggacttaagagaattcatctatttggtcaattggtgggtgaggaccagcccagcctgcttttctgggcatcattccttttgtttctcttcctttcctggtcctttatgcttctagtgcctgttttctgttgtggctacagggtgaagtaatttgggagaaggccctgggttcaaatttcaaatccttttctgctatgagcttcagattttctgcttggggaagagtctgacttggtcccagtaattttccaaaatgacagagaccaaagttgagttcagttccttagagattctcttatctctgatccagctcctgggacaaaggagatcagtgaggagagggtgagactggagattgcaggaagaactgggagaaaacaagcctgtaagggtcagaggcttcctggggcatagggatgcactgtcgtcatcatcaaaaacattcttcccattactgagctcctaccatgtgctaaggattgtacagggctcttttcatatgttgtcttgtggtgatccgcacagcagccttcaagtgggttattaccaccccattctattttattgttattttttgagataagattgctcgatctggagcgcagtgacacaatcacagctaactgcagcctcgacttcctaggctcaagccaaggaagagctcccaagtagctggggactacaggtatgcaccatcatgactgactaatttttattattattattttttgtagaaacagggtctcactatgttgcccaggcctgtcttgaactcctgggctctagcagtccctctgcctcggcctcccaaagtgctgggattacaggtgtgagctaccacacctggtcccacccccattttagagaggagaaagatgagatttccagagattggctgatttgcccaagacccaaggctagtaagcagcagaaccaagatatctgtgtggagccaaatcagcttcctaccatgcctcaccactggctaaacccactattcccatctcctggcccttgccctaggagcatttcgtagcagcttttcctctaatgtttttcatccagcaggatttttcatcctaagtggccagtctcaaaggggaggctgaccttattctcttgtgaatgtagctcttcttgatcactctctcctccttccctgggaaataggaaatgctgaaaagatctctttctccacaagacatccctccaccaaatcccctctcctttgcttacccagacagttgtgtccgtcatgtgccaggtggaatccatcatagcaggtacaccggtaattgccagggatgttgacacagtcatgcacacaacctgcattatcctctcgctcgcactcatccacgtctgtgggcaaagggaagctgagacagctgaacccacctgcgaacccactgtccacccccagactcagccttatggttgtgtttacatagttatgttcatggcctataagccatttagcatttttctgttttcatttaaacctaagtcatgaacattttcaggtctccatccagtctttctaattaccattgtacatggttgcagaatattatttttctatttttttctctattgttagagatttagatttctttaatttattttaccatcatagataatgcatcaaagaacatcttctcccatgtattattttgttactttgaataagtccccaagagtaaaattcctggatcaaaggaaataccttttaagattcctggtaggtattacaaaattacttttcaatttataatgcaactaggaattaacaagtgtaccctgtccactaaagtctcaccaacactgaagctcataaatttaatatctcaaggctactttaatttgcattgatttaattatgaggggaagatgtgtttacattatgaacttcctctgaagcacactttctgttcccatccattgtggatgtggtgtaagggtctaaagataaaggttccaatgtcagggaacctcaggtcttagtcttatgattttcatgctcccaccccagccaggttgtgggctgtgaactgtccccaccagggcctctgctagcctgcatggtgcctttgtgcaaattagaaaatggcaccctctctgggaagatgcagttgcccccctcaccacccccccaccacttgaccagtggaatttctagccttgatgtgatggagagtggccaactgagggcagtggcactggtttgccttcttccacaggtccctctcctccaggtgcccttccagcctcacctttgcagtgtttgccgtcccctgtgtagccagacttgcagatgcacttgtatgacctcggggtgttctggcagatagcatcgatgtggcagttgtcagtcccctccacacactcatccacatctggcaggggcagagggggcacatgagaacctctgttggcacctcttaaggggtgtcttgaaggtgggcttccaagggcagaatcccctcttctctaaaacagaggcagtgaccccctccagaaacaggtgctgtctcacatctctctgatttcagagtaggcagacactgattttgggaattcagaaggaacccccactgccctcaaaaatactaaattcacagtgacagctaaaactccatcattcgaaacactcctttttttatttgaaaacaaacaaaaaacccttagagtgggtagtacacttaacttgattaggaataatcaacttaaagtgaatgagtttacggagaaggcttagagggaaagttaagggaaaaggcatgggaacagtggtctctgggaaggtggcagggtccagcaatcactagtaaaggaggaagaaagggggatggggcatctgagggatcttcatctgtgtcatgattctgcttgagaccaggcctgcttccacttgcccaccatggagccaagaagctttagaggaaaaatgttccatcctggatgattttcctcggcccctgtgctgccaacaatggagacatccagagctggcagaggttggcaccagctacctgaagcctaataagtgcagcccttcaggccctaatccccagtgtttagccctctgtctcctggccctagctctaacaataggtgctacacacacagctatacttgaaggaagaggccactcaccatctagcaaaaaagaggatggttaggaaaggacatagatgatgccaggcgcggtggctcatgcctgtaatcccagcactttgggaggccaaggcaggtggatcatgaggtcaggagttcgagaccagcctgaccttgatgaaaccccatctctactaaaaatacaaaaattagccaggtgtggtgatgtgtgcctgtaatcccagctactcaggaggctgtggcaggagaatcgcttgaaccagggaggcggaggttgcagtgagctgagatcgcgctaatgcactccagcctgggcgacagtgagactctatctcaaaaaaaaaaaaaaaaaaaaaaggacatagaaaagagtccaacttctgaggcaatattatggtgcccttaaatctgaactgaaatagagaaacatgttattcagttgaaaacgccttattgagtgtgtttgtgaaagacactataatgatagctgtggaggctcaaaggtgactcagcccagccaaaaggagaaacaaaaaacatggagcagaatgtggtacatgccctgaagacatgagagataaggtgagggggtcctccaccctgcacatcagagtcaactctcctaggagatgtccaagccacaaccccagagattctggtcagatagcctggactggtgccgggccatcagtatttttctaaagctcttccagttattctaatgtgtagtcaaggttgagaacctgtgttacggggcagatcagaggagaaagagattacttccagctggaaactgggaaacccaaaatagtgtcttaagtagcagcctgcaagtgagtgatcactgaatgggaggcattactctcctgtgatcccacaactgagcacagaaaggagatgagatttgacaccaagacaatttgatatccaagtgtgatctatgggccatagaattgcctaggttttattaaaatgcagattctcaggactcattatagcctttttgaatccaaatccttaagtgattatttttactgagtgaatggatgcatggaccagtattctctccaatttatagatacccagagtcctagcttgagacagttatctgtcctccgcttttatactctgaaacttcctggggctaagaagagaactgaaatccccaaacaccctgcctcaaatctcacaggtttccgttcagctcttcattctacccttcaactcctatgcagccaaccatcataccagttgattctaagtgctgggagcctctgtctacacttactctccacctcgctcaggctccataggcatggtgtctacctgctggcccatcctgggaagtcatcccaacgtgacagaatggaaaagagagggcatggaagactagttcataggtaagggcaagagggacctcgcagatggtaaggtgctctgtggagaatcagtttgtccaactgataaacagaaaacagtacaaagaaatgtgctatcacagaacgatcttaagcactggaaccagtcagtcccagattcaaatccagctctacccttctctagggatggttttcttattctccatctcctcccccttaaaatggggatgataatacctcctcatgagaggctgtgagtagctgatgggataatttgtgtaaattggctaataaagtatctggtaaacagtagggtcccaatacaggaagcttgagatggtattaaatcactggtcaggcaatagatgctcgagacagtatgacagccactagccacatgtggttatttaatttaaaattcacttcctcagttgcactagccacaggccaaatgcgcaatagccacatgtggctagtggctaccatggcggaaagcatagatatggaacatttccaacaccacagaaatagcactgctattagcacaccacaggatagcactgctctggggttctgaataagagatactccctgggtccagcagcacggatactggtctggaactgctcccctgaccatatcagaggtatgtgcctgtgactgaatcagctggtgcttcactagagactgtgtcagactatatgggctcccaattctttcctttgcctcccattcagtgctcaccagtactagagtggatcttgatgctgatcaccacaaacccaggcctcccagcagattcttttttttttttttttttttttttttgagatgaagtctcggtctgtcacccaggctggagtacagtagtggtgtgatctcggctcactgcaacctctgcctcccaggttcaagctattcttctgcctcagcctcctgagtatctgggattacaggcatgtgccaccacacttggctaatttttgtattattaatagagacatggttttgccacattggccaggctggtctcgaactcctgacctcaagtgatctgcccgccttagcctcccaaagtgctgggattacaggcgcgagccactacacctggccacagattttttagacccctcctacagccagacttctcccaccatctaactaacccctctcccttacctccctgctcacaatgcttatccctctccagcaaagagtctctgctctggaagacattatctcttcctgttccctctacaatacctaaccatcctattcctttctatgcatttgcgtattttcgttattcacattgcagatgcattcctcatttttctcttccagccacactatgctcagctttccattccagctcaaatttttcttcccaaaagctcttccttgtaagccccgttcctggtgagttcctggtccaaggggactgttctcctcagttcatttacagccgtcactgaattgctctgctaatactttaaagcgtgttcagctttcctcacctggctgggtacctgctgaggaagatgtcccttcaatgtttggttggagtcttttgaagcagaacagacctaagacaaagctgtgaaagagggccccaaattatacccagtatctcctccttttaccactcattcttccagagttctctcctaccatatgtgcccacccagaatttgtccttgcaaggacccttcaacgctcacagcacagtctcatcttagcctgttctctcaggatgcaggtgcttactagctggaaaaccagttgatgctactgggtgtggactggtttaaaccagcggttctcaaccctggggctacacactggaattccctgggggttttgaaaaaaatgtgaatgtacagatgtcccctagaccagctgaatcaggatctccagggtgaggctgtggctactatctgtcttcctttcccaaggtaatgccaataaactatttgcccaagctgggaagagaccagggcagccacatgacagagtagttaagagagaggttctggagcaacattgtcagttcaattgctagctctacctgtgtctgtgtggtcctgggccagcctctgaacttacctgttccctcctctgtatgtgggaataatattcatcatagtacctccccatggggcttccaggaacatcagttgaattaatacccatcaagtacttaacaccacagtgtgggcatatagaaagtgctcaacaaaggtttgctatttttttctttctttttgaaacagagacagggtcttgctctgcttatccaggcaggaatgcaatggcatgaacatagctcactgcaacctcgaaatcctgggctcaagtgatcctcccacctcagcctactgagtaactgggactatatgcgcgtggcatcatgctcagccaattttttaaaatttttagaggcagggtcttgctatgttgcccaagctggtctcgaactcctggatttgaacgaccctctcatgtcagcctcccaaagtgctggtattacaggtgtgagtcgccatgcctagccaaggtttgctactattattccttctctccaaccttctccctgtattctttctgaactccctttccctatcaaagccccatttcaggcctggtgtggggaaatgcagcaccaggtgagcatgtgttggtggggaggatttggggagacacatccccactgcttactctacctgtgctgggaactgcacaaagaatgggggtgaagtgggtgagaggccagttgggaacccaaaagctgtcctctacaattctttttgaaggctagggagatcccactcctacttcaggccatgcattggaaccaaagttgaggtgggggagagtggtggctgcacagataccatagacaagccaagacctccctgcctcgccctgtcctggcatgaaggcacaggtctgtaactacagcagcttttcccagtaccatctgacatttcttctgaatttgctttagcgcctagcagagcactccataaactctcctaaagtaggtaggaagggtaggatggggtatgggatatgagggtcagagggtcagaccagaaagggtggattattataaaacaagtagtcctaagattctgaggatgggcaggtgtaccctaaaagggaagcagtgggattcccaagtaaatacttcatctacttcacaagtttgcccaagcccagctcaggaacagtaacaaatggaaatgagcagggatgccggctgtggacaagcagaccccctaggtagagtccaccccaccttcccattaccacaggaattattaccttaccacccataggggagggggtaattgtgggcaaatttgatgggcccagtgggacagtcagaaacagcctgcctagagccctaatgtacccacccacatagctgtgacatcctcagcccagccaggctagcccaggatatatggtgtgtgtagcgcactctgctattttcctctccttgaatgtccttgaggacccagttcaggtgcctctgctgggacactccctgtgacactaccagccttctctgatctactctttctcttgactcctaagacttactgtcaggctctctggtcacctgatcaatcccaggcttgtgatacctcatatgctaccttgtaccattatttaacttttagttcatgtgtataattttcctactgaagcagtaggagcttgaggccatggctcctaaagctttgaaacccatgcagcaactgaaatagagctcagcattcattcattcactcactcactcaatagttattgagcacctccaacatgcgaagcaccgtgctaggtgctggggatttggcagtgaaccagagatgaattctacattgaagccacttagtaaatatttgttaaacagatagacgagtggatggagacatggatgcattagtagtgagtggataatgtctctatctgtggcatcccttctgctctatgttacctcagagaaaaatctcacttctttactctccgtgatcccacaactgttctggatgggggaagtcccaggaagtttagtctcaagtggagagtagggagagaggaaactaaattcagaggggtagtacccacttaaaggcatccatatgatgagtgctggggccagaagagactggaaccaatgagtcatagggtctcagggtcttcagacatcatatggggctgctacagggatcttttcagagcatccccttcaacagatgttcctcagcctccatgctaactctcaatgatggggcacctgacacaggcattccactgcttgcccctggtgatttccctcattctcacctctaagtaacatccaaaataaaaccagcccagccttgggccatgatatcctaacccacagcatgtgcacatgtacccacatctgcatatctgctctacctccagatcaaaatagcaaccagggagattggcagagcctggagtaccaggctgtcttcccagtttgggactggctgaggcactgtgacttcagtgagagtctgggcccatcctcagtctagaaaaagcttatgcaaggatgagggtagcctagagaaagtccagaaaaccacacaaatgaccacctgttgattccaaggcggagacagagcactttctccttttaaaaacagtatcctctcctctcactcaagcttagcctgctcaactgaacagccaggaaaagctgctggtgtttggtgatttgaagggaagggggtctgaacctcagaagcttgtcacttactggggaccctgatgagtttctctctgttgtcctgccttatccctaatctagctccctgatcatttgaatgtaaccctaattggacaagaattttctccctttcagtatggacaaaatcaacaaccatgaatcagagacttttagaggatgggtagtgaagtgggggaagaacagaacattgtagagtgaggggcagagaggcaggcagtgggcatgggtaggttctggttttgtgattagtaatattatctctttaattgaaaaaaataaactcatttcagattcgtataatttcactaagtgtacagttttttcatgcaggttggttcacgtggtcttcaaactgtcctctctcatctggggcccagtgaggatacctcaggaaagagcaagtagctagtgtaaagccaggatccaggtcttcaaactcccagtccagtgctctctaactacccactgtgttctctaagcacttgagggaggaatccatgccttagtcattattgtacctcccccaactccacctcagcacttagttcagcatgaagcatgcatccagtatataaccgtggagcggaaggagctgaaatgtacatgatccagggaggaaatcagcagtgggaatgcagatgctctgaggctttgggcatgggagcagcagaagagagcaaggctgagtagtgggcagggagggtacagacacagttgcaataaggaaagggtgggcaatgcaacagtgggcaggtgttgcctgcccttggattcactatgctggggccaagcagctggttagaaacaaaaacaaacaccagggatacaggttcctgctgttaacagcttcaaaccgccagaggaaaactccaaataaatataattagaaacttgtaaaaacgtcctctctgtaaacctgctccccagggtctacccttcaagcactccccttccccagccctccccccaatgcccacatatcctgatactccccactttcagagggattccttagatgtgtttccttatcctggatcttccctccagccctgcagcccctgcccaggtctttcctcagcttgttaccaccagtgaccagacctgaagagcccctggtgtaggctcagaaatccaaaccccacagctctctagggctatggttataaccacagggaaaaccagaggtaagagcaaggaccactgtgccctatataggggtcatcatcccatttgttcagccaaagcacagcatctaacagcaactacaaagcagtgcttgatctgcagggggacatgtctaggctagggcagaatacagacagctagtctcagagctagaaacacggaatcctggggcccagatccaagaatattcagttcccataacacggatatttcagctccacttcccaactttgttggatacacacatatagaaacacacatgtgttcttcaggggctatttccagggataaatacccacttcatggacacagtaagaactatcagctacttggggttccaggaaactggggtgggggaagaaaggaagagtatccagatgacctagcctcaggcaggcagaagtggaccagcatccaaggaggagagcgcctgagatttgggtgagtaacctgtggaggcccggcgccttctgccttcagcaggaaggatttcagtgagatgtgcagaatctcagggctgcagggaaccctactgatattttacaagtgagaagagggatttcagtgatttcctccgaggctcaaatccttaggctctgcatttgtctaaacccactggcaccatatacctctatatccccggtgccacttgaggctggcattgggtgggcataggaacaggagagtagccagtccaatgttaagtggccagtgggggaggggagtctctgtcccctcttagcccaggtgactagctcctgtaccccctagacatccctgggttggccgttgtttcgcttctatacccaaggcccagcagtccttctgtttccagactccagtcttctgagcctgaagaagctgtccccaggtctgggcctcttgcaggcactgccagcctcagagcagctctgcagtttccagccctgacagggactctttcttataagtggtcatgtgctagggatacgggatgtcaaaggaggcccacaccctgacatttggggaccagagctgggggaaaggactgagtgagttcaggcagcaagctcttccagctccatcttctcaaaaggtctgaagcccttcgttcccttcccctgtcctcagttcaaggcactggaccaagccattccacttctttacttctccaactaaaacaaaatgcatattgccccacttcctttttcctctcaccagagcacttcacacacacacacaccctgagtcatgcacacacattcacacgtgtgtgaatgcacacttcacattcccaaactcacacccagggccggctcctcttacaacaggtcccagctgctcacatctcaaaccggttctcatgctctcagattcctgaaggtttcaaaaaacaatctcatttgagggctgctgatgactgtcttctttctctgcctgcagtaattctggccttagtgtcttctagtcccctttctcttattccaccctgcagagactcaaagagatgagaaggaaggggttgaaaacagggaaaagtctctgtactctcccaccccgaggctttccccacctctgagacatgtcatgagagaagagaggtcaaagggattcctgaggaatttctaagcagtccaccctcttctccaccttctggaaaaatgggggtgggcttagagggaactgactaaagatcaggctctgagtggggactctccctctctccagtgtggcctggacagggcacaggcaatagccggctgcccacggggccacccttacccgctgacatggttatggttttcatttcatattttggagggaggggctagtaggaacagtcccctcactgtaagagctggccacaggagcccagggaagcggggaggaaaggaaacagccacattaaagaggaagagaagggtgggagaaagaaagagacacatacacccagacagagacccggagagacacaccgagacagagagacactgtttgccaccacatgaacgctctcagtcccagggatggggttacttggaaattctaaatgcatgactttatcaaaactctatccctaacaaggagagaaaactaccaggtaaactaaacggccaggctggctctcctggagccagccctggggacaagtttccctggaggccgagagaccttttcattcagctgtaacctgagccctatgcgaggattaggtctttttaaccactgctgcacacacccccccccccgccgcgcctcccccccgccccccccccccccgccaaacacccacccccttaccaaaagcaaagcaaattaatgcttttaagttaacaattatcttggttatccagtctgtctactttaaaatatacagacaagcacttgaaaaacactcaaaaccatgtcccctcatgctccctcccttcccagtcacacaggcttacccacctactcttccatacagttctcacagacactaaaacagcagtttacccttagcaactacgtcacaagaaacacagacatccagctatgttgcctgtgggtaactgtggtgaacctctcatgtgtgcacagtcgcacactcacctttacacttagggctcccttccttgtctccccctttccccccttccacatgactttggttttcccattgtgggaatcactgatgaaaagggacagaaacccagatacccccagaggtatagtaactccgtgcaagatacttgccaagggtatttgattttaaagacctgctagtgctttatataaagcatgtggcattaaaggcacactttctggcactgctgataaccaggagatatgtttgaaggtaaggcctccctgatgctcacagactgtgtctatgggtaaggctgtaaggttgccccgcctggtcagtactagttcttcctgcagcatctgcctgcaagtttgtgtccagagacatccctgtaacccagcaaacctgctattaggcaacctctggcagatggggtttgtagatttcctgaagagaagggtcaatgaaaggcttccattctaggccaagcttagggatcagaagaaaagaaggaggataccaagctaactgcggtccagtcacaggaagggtggcctgtgaatgagataagctggggacaaaaactactctaagttccttgagggcaggggccttcactctggcagcatgttcctcagtacccagcagggagtccaatgaaagtggaagccctggagtaccatgcagggattctgactcccgttcctgaatcatgagctgatctcccatacttgagtgccttggcttgatggcacctgtcccttggaggggtctccatctgcccctgggcccccctcgaatacactgcttctcctttggtccacagcctcactaggccactacagacactggctccaacttgaaagaggcccttatcttgtctctaggttacttcatgatatctgttccttccttcagactaaactccccacctaattccatgttatgagtaagtcagcacacactacaaaagccagctttgtttatgaaaacacaaatccacagtgaggagaggggctgctcccaggttgggggtggcagtggcgatgcgctgtctggaaccaggactggaaaagaggcagtgtggggctggaaggtgtgggggcagggtccagtatttgacagctgaggatctctagtgtttcagttctgtgaaaggacaggttggagggggaagaggttagctgaagaggcagtgtttggggagaggagggcggcattgatacagcaccttcctcttcacagagcaggagcccatccaatacaacagagcagcttaagagccaaacgctcaggctctgggacacagcgacctgtgtcggacactcaggcttccccaactcccaagttcaactttccttctggcccagccatctcctcacccagctggcttcaggagcccctgggacaataggcagaatcatactctcctgggcaaaaccttgccaggaggaattttctttttgtccatataaatctcttgtcggtgaggacacgatgggggaggggtacagcaagaggtcaagggggaggagaaactgtcccgagagaactgtagtacatcagcctagtctctgcctgcacagccttgggacctgccaggcgatgagctgggggtcagggacgggggcgggaggcctccctgtctctctttaattcctagagggatctgtcagagctccccggcctggaattctactttgttattttaatgcaattctgacctggatttaaatggaattggaaacccgaggccttaataaataaatattatgataagaaatgaaagccatgcaagacgaaagagatttcaccccaaagaggcagaaacgcaacattcctgtcgggagccagtcacagaaattttcttctcttcttcagccccctaccatccggtgagagatgagttgatttttccataaaagatcctatttttcttcaacatttttccactgataaggcatcaacttagaaatgtctaactttgcatgcgggttgggggtaagggaaagaaatatacggcacggctgaaaagttttcattattccctcagtctctccaggccacagcgtaagtttctggcaatgtttgagagaagagaaaattctctctcagattttggaagacaagaagtctttcgaagatgctgggagtggatgaagtcgagcggaattctgaggcgcgtggtctcttctgcccaccgcccccaagagtttctcactcctctctgccgcccccagcttgtccggcttttcgctcggggcgcagcgcccagcggtcgggcccctggccggggagtccgggtgcacagagccgggttctgacagcagcacgctccccagcacctgccctgcccctcgggaatcgctcctaggccctgaggcccagcagccaggacagcccccaggccgcgcgcccctccttccttaccttgcgcggctttgctgtactgggcggcgcgggcgtggaccagcaggacaagcaggcagagcccgggtacgcgccccgagcccatggctggagctactggcggcccagccgccggggccggtctcgcggccaggggagggcggaagccggccggatcccagctcgcaggagggggaggggagggggcgccccgccggggccaggccgggggctgcagtcgcggggcgcggaccgcggcgccctcggcgcgaggctcccgatgctaccggctcctcctggccggacgtcggggagagcgaggcggagagtgcgacgaggcgaggggcgccaggggcgactgacggaggggaacccccgccctctccaagccggcctctgccagcggcggcggcggggctgctccgtgtaatcccacccaattcccagcttcgccgggagagagctgcagccggagagcgcgcagagcccgagcgaaggacctgagaaaggggaggggaaacgcagcgccagaaacacgccctttctgcctctctttcttcctctctcgctctttctccgtctctcaggctctttttcttcgcctttctcctcctcctcctctttctcctcctctcctcgctccttttcgttttcttcctcctccccctcctcctcctcctcctcctcctccttctccaccacctcctttttcgtgcccttttttctttcaaatggggcctcggcgcggtggccgctccccctgcgcgcccgggcgcggtggccccctccccaggctgccgggccgctgcctgcaggaatttacaatccggcgatgggggagcgggcctggtctccatggagacggcttccccgggagcagggaggtcaggcgcagaccgcgcgcaatcaatggatcaatgcaagctccgctcggctccagaccaaacagcaccgggctccgactcgtcctcgctcccctaggaaagagtcggggagcgagggtgcgtccccgcgctcgctcgcgaggacggccgtgcggcgccaggtttgaacgcacacctccacccgagacaaagagggtgcgaggtgttggggaggctggggcagacgtggacacacggacacacgggcactcgggcgtgtccaccgacacagcctgacaggggacataggacctcggaacacaccgcctccgacaccaggccgagtaacaacctctcaacttttacacctaccacacccccaacctcaagactcagtccccattcctagatgcgagtccactttgaggaccaaaaagaaagtagcctccgcctgctaaaactgccagctccagggcagactcccttgcagttaaggccttggaggtaagcctaatgaaccaccctacccgcagagacatggactcacatacagacactctcatgtggtcagcacaggggcgaaagctaccccacagaatcatgtctatgtgtataaacacagagacatagagacaggtacaagaggctcctccaaacctgcaccccgcttcaagaggtggtcctgactggtccattctgaacccttcatccttccaactgaggggaagcagaggaaagagaaaggatatttttaaaacaggggcaaaccgcagaaggagcagggtcttccaaccatggatgctgcctcttgactgttcacccactctgtatcttctttccttccattgtaagggaaagaggaaagacctcttgaaaggctatgaagactttcttggagtgtgaggctgtgttcagaatgagaccaggccaggtccagttttctacagggaagatgctgctaggacccagactagcctcacagagccctcagcgtacccaggaggaagaggcaatgaccaagatctcctcaaaggtgccgccatctaacataccatccttcagcccttggtgaagtcctgaagccagacctctgggagtctactcagggaacccactgcctcaaacaaatttgcaaataaaattattgtatttgaaataggcccacattggtgaagttaagatgtggaactaattgtatgtgtatttctatataaccacagactcaatgtttgatgtttgacatttattgtgcacttactatgtaccagggacttaaaggatgtggggattcaaagatgacatggtttctccttttaagtttatgatttggcaagagaaattcacatctaaataattggaatataaggcagaatgtggtaaatgtccaaacatggaggtgccaacataaaattctaatgagggcataaagagcacagattaattccagctggaagcaggaggacaactcagtggaggaggaaagggtttaaagctgacctcaaagaatatatagaattctcatacatggagttgggtgaagagagtgagggctttccaggtggcaggaacaacatgagcaaagacttggagaggagaatgtcttcagggaattaataattggttcaatcagagacaagtatttcagagagtgtggaggaagatctgaaaggtgggatggggctagacaatgaagagcctgtttccatcagatgctaagcgactgacagtgttgcataggctccgggaacccggcaactttacagcaaagtagcagcatggcgggctcacttcatgaattagctttatgtgtgctccaggatttcttcaatgtgttgatttttagtgaatttatttcatcatgaatgcaggaagagaacagaaagaaaaacggggaaaagaggacataaaaagaagtgggctgggcatggtggctcacacctgtaatcccagcactctgggagcctgaggcaggcggatgacgaggtcaggagatcaagaccatcctgactaacacagtgaaaccccatctctactaaaaatacaaaaaattagctgggtgtggtggcggatgcctggagtcccagctactcgggaggctgaggcaggagaatggtgtgaaccccaggaggcggagcttgcagtgagccgagatttggccactgtactccagcctgggtgacagagcaagactccgtttcaaacaaacaaacaaacaaaaaagaagtgacagggagggaaataatggacagaaggaaaagagagatggagaaggaagagagagaaagagaaggaggcagccctggaggagacaaggcaaaccctgaactgttcaggggccaagcttaaggagctacttgggcttttccaggcaaacgacctctggcttcttgccctggccaaccacagaggacaatgtgaggcgagtttgtttggtgatgtgttttctgctggccctgtttgtttgtttttcatttttctggtattggacagatctggggtgaaggaagagggagacagggttgtggctggcattgatagtggtccttgggctgggctctgggctgcccagagcccccctttagtgggggcttatgggcattggagctgaacttttgatgtccctggaagggggcctttttgtaggtgcccagagccaggtggccttcccaagcctggagatggtttgccctaagctctttgtctctgtctttccccaccctggcaagaaagaattagtccttgaggcctgggctccttgcctgtgtagccaggatgtcgtgctgggctggggagcccatgggggtagcaagagcagctgcttccagattggtgctggggaacgcaggggcagtccacgagagccagccttctccccagccccgatgatgagtctggctttctctcccgtcccacagcccttggaagccaacctaacaagttctattaaagttaatgaaacacaatgattcctctgtttgcttggttacaactcattacgagttgctcttgcttgctcggcttttgcagaggagattcatttgagtagccagtgcttggcctttgtccccctaatttttactggcccattaacaagatcagacactttggctgaccaggaatatctagtacccaagtcccaacaaaacccattgggtggagtttcagatgaccttttgagtctaaattagcctaaaaacatgctgccgcccttcctccctctgttgcttccctatatccaaactcagttttatatgtaggtacaataggagtatgcagagatttcagaagttaggagatgcttttccagcctctttagaatgtatctcaacccactgatttagagaagttccctagtaagagctccagctcgatttaagggctttcctcccccatttaaatggaaataaactgaacattgttagtcacttatactttggtgtgaattagttcatattgtcactttaaggggatttgggagtctcctaaattgtatacaaacttttgtccacattatccattcttccagagagaggttttctatagctttcttcaaaatttccataaccgtccccccaccccctaccccaacacgtacacacacacacacacaaactctctctctctcaaaaggttaacaacctctgtgttagtagaagagtgggccgtaactggggcacagaagacaaactctccttccttcaccatctgcttggccagtcctgcctctaaggagggaccttcccctcctccttgagttccttatccacagacctcccattgtcaccacagctcaatcatgtgcttcccaaatcttaaaaccaacctcaagttggtggggaggagtcaaaaggagagcccttgaactctatgttgatttacatgccgaggctgtaaatgataggtttacatgctggtgtaaatactcataaactcgcagtaagtgcagggcatcacatgctttcagtgtccagatcctctgcagcccgtacaggcctggcattctcagggtcagggaggagagcgccgagttggcagcagctagcatgacaggggctgactatgactatggaggaaaagggcgtgcttggagttggtctctaaaccctcatcctctcccatacagcaggtggcttctgcacagtgataccttggcatgactccccctgctgctcagccagcctgactgttcttttgggttaaagcattgtctccagaaggtccctgttaaaatgcaaaggggcttcttgcagggtgacttgggctggttggctgactggctgtcactcaacagaaaacagagaccccagatcagggaggttaaggtttgggagaaaggttcaggtgggtcaatactatagctatatgaagttgatttaaatggctttccaggtgttctccctaattccactcttgggggctgagaatctatccttcatatggcagccagagtcgttttaaagctgggccatacaacctcaacgtgattgacgtttgttggggggccatcctatgcattgtagcacatttagcagcatccctggcctctacccactaggtgccagcagcagcactccctccccacgttgcgacagccaaaaatgtctacagacattgacacatgtcccctgggggaggggagtgaaatcataccccctatcttcacttccccctgccccactgagaatctccatcataaagtgtaagtcagcccatgttactccctggtcaaaaatcctaccatgtcttctcattgttctgagcatgaaatccgccgtttggcccagccttcaaggccttgtgtagtccagccttgcctccctctcctgccccaccttgtacccctctgctgtcatctaccatcaccctttagccacatataaccctttttgacatacctcgataaaccaagctctttcttggacagggtggaagatggagagatatgggcagatttagagtaagtttcagaggccctaatttctttggattttactgggaggccttttcttttcgcttttttgagatggagtttaactcttgtcgcccaggctggagtacaatggcgtgatctcggctcactgcaacctctgcctcctggtttcaagcaattctcctgattcagcctcctgagtagctgggattacaagcgcttgccaccatgcccggctaatttttgtattttttagtagagacagggtttcaccatgttggccgggctggtcttgaactcctgatctcagaacgtaagctccatcagagcagggaccatgtctggcttgttcactatcgtgtcctcatcatctcctgtactgcctgccacatgaacaatggccattaacaggcatggaactggagcagaaatggaatgaaccctaggggcctgggagcctggaggggtgtaggagtggggaggggattggggagacaggcggcagaggaaagcgcctgccctcgcctcctcccatcaccccctatacccctgtccctaatgaggtgcttctggcggcacctgacttttccattgcaaacaccacttgactctcggcccttcacactctcatgaggttctaaggggctgcacaggcgccgcccaccccagccatgccctgggactcaccacacaccaggaaggccgggagctgcagcaaggggacagcttaaaacagccccaccaacaccccaaagtgggtctcccagttccccgagaaggcctggatgccctgctgaagggtgagcagggccatgtgggtgacttggaggacccaattccccggccatgggaacccccagcctgggctttctttgggggtagctgagacaacgagcccccacccagagcaggagatgacgcattttttctgtggccacaagccactttgacgggtccgccccactggggagcaaccgaaacctcatcccacccaaagcggcctttgtctgcactacatatttgtcttatttggaagatttttgtgggttttcctgtctttctccagcgctcactgccctaagggggacgaaggccatggcggagctgagggaagggggtgagaggcattcttggggcgctgtgcctggtggtctgcagcacatttgggggtgggagagaaatccaccccacacaccctcggcgccccagtgatgccttggccccaggccacactctgggccttgcctgtcctctgtggactcgtgcccctcctggtcctcccagagctgtttcctctccatcttctctcagcctcctcagctcactctccaatacttctgtttattccctcatgttccatccttccagccagcttggcacctcatcatttcctacctcccccgtcatgggaccctctgctttctttctacctgtctgaattctgaagactctcccagggcttgttcccccatcttgcctcctcctgggagcctccctggactactgtagcgcttggcaggatctcctccttctgaaatgtaaaagtatgtgttttctatcctttctgtgattctaaacacaccctgcccctataccacctgcccagctaaatagaggccagaggccatggcttttgtgccttggcgtccaagccccatcctgccttgtacaaagcaattgctcaactaatatttgttggtttggggcttcttaagggctacccatgagattaccaacaaattagagaatttcagtgatggaagggacctaagagcttgaattcttgctaaggggtgtctgggttcagcttacatacctttaatgacagggatcttaccacttcctggggcaacccattcccttgcctgtaactctgaccataagaaagttcttccccacgttgagctaaaacctgctgccttctggctttccccaccctactcccaactaggtcacatcaaactattccagtcctctttcctcacgaccacccttcagatatttgagggcagcaatctcctacctctgcagtcttttcttttccagggggaaacacctgtagtcctaaccttcagtgccccaatgcccctgatgaccatggactttgggtattcccccccacccctgtgctgggcctctcccacatccctgctgaactcattcttctcacaaaatcccc

SEQ ID NO: 641 - DNA, 1646 bp, Homo Sapiens
gatatattctcggtgaaggagttagcaactgcaatttgcgctcaaacctggctgttccattaacttttataatgaacctgaaaactgagtgctggagtattattaaagctgctattttacaggtggtgggagagaggatcttgaagttgtcttcctctttctggcttatttcacttaacataacatcctccaagttcatccatattgctccaaattacagaatttccatatttttaaagaaagaatagtatttcattgtgtatatttaccacaattttctttattctttcttctattgatggatacaggttgattccatacctcggctattgtgaataatgcagcaatgactatgagagggcagatatctcttctacatattgatggcacttcttttggatttatacccagtagtgggattgagggatcatatggtagttctatttttaattttttgaagaacatccacactgttttctgtactattgccaccaacagtatgcaaagattcagattttctccccattctctctgatacttatcctgcatcttattgttagtagccattctaacgggtgtgtgcttagattccactctggttgtaatttgcatttgtctgtcgattcaggattgtatgtggtttcattttagattttagattttttttctatttttgggaagaatgtcattgatattttcatagaaattgcactgaatcgctacatcactgtgggtaatactgatattttaacaataacaatcttttttattgttcttttagtctcaaattcatctatttatttcctaatctttattttgttccttctagtaatttggagtttggtttattcttgcttttctagttatttgaagtgcatcattgggttatttatttaaaatatttctatttttttgatggaggagctcattactacacattcctctctttctacagctttgctgtataccatagattttagtatgttgtgtttctactttcatttgttttaagaaaattttaaatttttttcttaattttttcatttactcattgatgtttcaagagcatgttgtttaatttccatgtgtttttatattttctgaagttccaccggttacttatttctagttttattccattgttgtcagaaaagatacttgatataattgcaaattttttaatttgttgaaatttgttttatagcctaacttattgtctatcctgtagagtgttctatatgctgatgagaagaatgtatattctgcagcaattggatgaaatgttctataaatgtcagttaggctcatgtggtccagggcatggtttaatttcaatatttcttcattgatgtgtacattattgagagtggagtgctgatgtcctctactattattattttgaagtttatctgtccattagatctattaatgtttgctttatatattttgtgctctggtgttatgtgcacatctatttaaaattgttatatcctcctgctaaattagtccctttatttcaatattgtgactttctttgtctctttttgcagtctttgaattgaagtctatttcatctaatataagtacctataatcctgattttttttgttttacattagcatggaatatctattttccatcatatc

SEQ ID NO: 642 - DNA, 10528 bp, Homo Sapiens
acacgtagcggccaagatggcgctagcggttggagcaggggctctgctgcgacctttacggtagtgaggttagggacgatgggagagcagctttgttcctgaagtgccgtcgaggattaggatcgagtttcttcgatcgtgagggcaattattagtggcctctagccccccagatggcatcttgaggagagagaatccacgctacgagaactaacatagtggacatcgcagttgtccgtagccgatttgcgggttacggagttgttgcaagtaaagaaggggaaatccgagcgttctcgcgttggatttcctccacgtgtgaagtgggaatggtagtgatatctcgtgctatctctgtcaagggcaagaaggagaaggaatttatttgaggccctacgacgtggccctccctccgctgtctccctgaccttcctatgcatccagttgcttaagaactcttggaaagatagtaagtgaaatcttcatagaggatttttgtactttaacatatattatttgatttgagcctcgcaacatttcagtgtgacaggtacgattaaggtctttcatactatgaatgagaaaaacatagatgtaccaaggactcaccaaatttcacggagctaggaattggaagagagctaggctttgtaatcccaggtcttctgacctccaaatgtcctttcctctacagtgaatgtcaaaatgacaatgaatgtctactcctctacaatggagtacaaatcgaaagacaaggggcttataaaactgactctgaccttaagaagtagcatatgagtgatgaattattatagtcaatccttgtgcttactaagtgccacatactggtctaagcattttacatagtaattcagtccttagaacaactttatgaggtggaaacttttattatctctaattacaaaggaggcaactaaagtctaggaaagaagcaaaatagcttgcctaaagtcacacataagtaaatggtggctcacgcctgtaaacccagcactttgggaggctgaggcaagtggatcatttgaggtcaggagttcaagaccagcctggccaacatggtgaaagcccacctctactaaaaatacaaaaattagctgggcatggtggcatgtgcctgtaatcccagctactcgggaggctgagacaggagaattgcttgaaccagggaggtggaggttgcagtgagccaagatcgctctactgcattccagcgtgggcaacagagcaagactccatcttaaaaaaaaaaaaaaaaaaaaaagctaaagctgggatttaaacctgattatgttggctccagagcctatgctctagaccagtggttctaaactttaatggtcaataggaaccgcttgaggatcttgttaaaacgcaaatattggtagtatagatatcaggtaaggcctggatcctatagtcttaacaggcccccaggtgatgttgatggtgctggtcattacatactacagttcacatcttcccttttctcctaaccgtatttattttgcagtcagaaactacctttcccatgctgcctgtgactgctttatagtctcaaatgttcccaacatgctcttccttaaggattagactcaaactttttcctcaaaaagcttatcctgcccctgtctttccctctaggataagacagacatccctgcctctgctcccctaccactcagtgtacaccttgttacagagctcagaacactgaattatggccatttatttgaaaatcttcctggccgggcatggtggctcatgcctgtattcccagtactttgggaggccgaggtgggctgatcacttgaggtcaggagttcaagaccagcttggccaacatggtgaaatcccgtctatactaaagatagaaaaattagccggtcatggtgttgtgcatctgtagtcctaggtactctactcgagaggctgaggcaggagaatctcttgaacccaggaggtggaggttgcagtgagctgagattgcgcaactgcacttcagcctgggcgacagagcaagactctgtctcaaaaaaaaagaaaagaaaatcttcctgactggacaacgagctctttgaggagaggaaccaatcaggtctgtgtactgtagagcctagcatataataagaataatagctaatacttacataggactttctgtattccagatcacgttatacacattaacttgtttaatctctactataaccttacagatacacttttatccccattttatgaatgaagaaactaaggcatagagaggttaaatagctggcccaaggtaacaagcttgtaagtaacagagccatgattttaaataaaagcactttggctccaggaaatgtgtggtgaattaaatgagagccactctacactcaaccaaagaaggaaaactgagacttactatcctattagacatgattataactacctctagtctgggaaaatacacagaaatctgttcccctggccaggtgcggtggctcacgcctgtaatcccaacactttgggaggccgaggcaggcggatcatctgagatcgagagttcgagaccagcttgaccaacatggagaaaccccgtctctactaaaagtacaaaattagccaggcatggtggcacatgcccgtaatcccagctactcgggaggctgaggcaggagagtagcttgagcccaggaggcggaggttgtggtgagccgagatcgcgccattgcacagcctgggcaacgagcgaaactccatctcaaaaaaataaataaaaatttttttaaaaaagaaatctgttcccctttgctggatttactttttttcctttctgtcctggaccccatggttatttatttcaaattcagtctcaatcagtactttcaagtttattcaaccatctctgtccttccatcgaccccgaaatagtcctcaacctgtgatcagtttcccatctttcctcatgtttgatatagctgttagttaactcttagtgcataagaaaaattatcccaaactttagtgacttaaaacaagaataattttttaaatttttatacagtttttgcattttctattggaatcaagagtggcttagctgggtggttctggcttggggtctcccaagcagttgcagctatctgaaggctgactggggctggaggatcagcttccaaggtacctcactcacattggttggaaagtcagcaaggaaagaggcctcaatttctcactatgtagacctccctataaggctgcttgagcatctttgggatatagtaactggattgccccagagcaagtgatccaagagtgttacagaagctataatgttgcaatatgtatacagagagatttagatataaaatcagattttatatatgtttgtataaatgtatataaaactcacgtactctgaaggtgaatttgtacaaagcagtaaagctagaacaactggtgggaataagttgaaataatactgcgtagcgtttattacagacccattatgaaaagaacaccttgcttatcttatttaaaccttacaacattcctatgacttggtaattattgttccattttacagttgaggaaaccaagccctagagaaaactcatttgtccaaattcaaatatcaccagaagactcttcccccaaacacacaggtgttaaggaggtctggttatctgtgattccataaccattgctgtggcctaaattatctgttttactcatgaatctccaatttgggtgggacttagtggggacagttaatctctactcctcttgacatcagcaagggaaatttgaagactgaggtctggaatcttatgagggctcgttcattcataagaccagcagttgacattggctgttgtctggaatcagtcacagacccacccaggttcaaggaaaggggaaatagattttatctcttgatagaagcatagtagcatcctggaacaccagaatattactgtgctcatttttagaaatatcaactgccatagtctatcttctgtccacaacagttcatattcctcccacatgcaaatggactcattcctaccacccaaagtcttcccattttggcaacatgcttaggtttgaggtccaagatcttgtcacctaaatcaagtccagatatgggttagttttcttaggtgcagttgctttcagtgtaaagactcgggaactaaagagacaagttaccttttccccacacatccaacatacaatggtgggacaggcatggaaaaaccactgtagaccttaatcagaaaggggaataaaggaggcacgccagggccactgattcataacagctctgatgctagttccttgatcaggaatgatctctaggaatgattctctacagctcttgactctaccctcaagcctccaggttacgctctcagaagcattaatgatctctaggaatgattctctacagctcttgactaccctcaagcctttaggttccgctctcagaggcattaatgatctctaggaatgattctctacagctctcgaccctaccctcaagcctctaggttctgctttcagaggctttctttattttccataaaatatagccagtgtttgagaccaattatttatttatttatttatctatttatttatttattgagatggagtctcactctgtcgcccaggctggagtgcagtagcacgatctcggctcactgcaaccgccgccttccaggttcaagcgattctcctgcctcagcctcccaagtagttgggactacaggcgtgcgccaccatgccccactaattgttgtatttttagtagagatggggtttcaccattttggccaagctggtctcaaactcctgaccttgtgatccacccgcctcagcctcccaaagtgctgggagtccaggcgtgagccaccacaccaggccatgtcattgtatcttttttagatggatgaatattaaatttatttatttattattttttttgagatggagtctcgctcttgtcacccagactggagtgcaatggcatgatcttggctcactgcaacctccgcctcccaggttcgagcaattaaccctgcctcagcctcccaagtagctgggattacaggcacgtgccccctcatccggttaatttttgtatttttactagagatggggtttcaccatgttggccaggctggtcctgaactcctggcctcaggtgatccacccgccttggcctcccaaagtactgggattacaggcaggagccactgtgcccagccatgtcatgataccttttttagatggatgaatattaaatttaaaaaacaaaatgatccgtgtgcgtagaaggaactaaaggggaaaaagatcaatctgaaaacaaactatatagaacagcataccagcttcatactaacatgataaaagcagaggctttgggtaaccaaaaagtatgctttttaagcatgagaataattctaaaggctagctatatcttttctttcttctaaaaataatttcagttaaagaatttacatataaagttcatttatcatcacccactgtgggtgaagctctgtcaggctccggagaaacaaattactaaacatgatcaactgcccttcacatactcataatctagtgggggagacagacacatacacagataattgccatacaatatggtgttcatggtattagcaagtgtgttttttttttgttgttttttttttaattttttttagtttcactcttgtcacccaggctggagtgcaactggcgtgatcccggctcactacaacctctgcctcctgggttcaagcgattctccttcctcagcctcccgagtagctaggattacaggtgtgtgccaccacgcctagcaaatttttgtatttttagtagagatggggtttcacaatgttggccaggctggtcttccaactcctgacctcaggtgatccagccgcctctgccccgcaaagtgctgagcttacaggcgtgagccaccgcacctagctggtattagcaagttgtaagaaaagagttcctgtaatcccagcactttgggaggccgaggcgggcggatcacgaggtcaggagatggagacaatcctggctaacacggtgacaccccgtctctactaaaaatacaaaaaattagccgggtgtggtggcgggtgcctgtagtcccagctactcgggaggctgaggcaggagaatggcctgaacctgggaggcagaggttgcagtgaatggagatcttgccactgcactccagcctgggcgacagagtgagactccgtctcaaaaaaaaaaaaaagaaaagaaaagaaaagagttaaggagccattaatacttcctaggagctagtaaggaaaagtcaccaagaagacagcatgcaagtagggccttaaaagatagaagttcaacagaaaaaggaggaaaggctattaaaatccgagaaagaaatagcaatggccaactcacaggcataaacataagaattttgggaaatgcatacatttcagtttagctaggtgggggtttgggggtggcctcattaccactggttggaggtaaaagtcccaactctccacttggccttgtctgacaccatcccacctgagaagggaagggcacctctttgccaccaggtacaggtgaaattccatgttttacatgtggtgggctgacaagtgtgaggggcaagtattaggagagggccttgttactgtccattgaggatgaaagtctaagcttccccctgtgtattctctgacatgaacccagaaatggagaaaggaagttgagtggtctcattagaacctggcctttgctggtgggggtgggggttgggttgtagtttttttcccgtggtacttatctggagtagagacattatcatctaaaaatgttctgtcttgcaaagctgctgctttcctagtcctttgactagacagagcaggcttttcctagggctttaaaaaaaaaatgctgtgcccattggcatttctgggttgccagcttctccagtacccaatctgggatatataaaagaaaacccagggaactcatttctgtgtattccttgggttccagatccttaggtggtctgccttcttgtcacctttcagattcttcttacatttgttttatgtataatgttttacatatagtgtccagggtttttagctgcacctaactgaaggaatagggaaaagtaaatatactctttctataagtggtagtctgaggtcaattgatttgttacaaagctgccaaggcaatgctctgtgaaagccaccattaaaagaatgcaacagtgggcaacaaactgggagaaaaatacttgtagaacacttatcagacataagacttgtatctaagtaagaaaacaaccccattttaaaataggcaaaagacgcttcaccgaagaggatatacagatgggaataagcacaagaaaacatactgaacatgattagccataagagaaatgcaaagtaaaatgacagtgtcacagctgggtgcagagactgtctccagatgctgagacaggagacatctccagatgctgggctcacttgagcccagggtttcgaggctgtagtgtgccgtgcttgcgtctgtgaatagccactgcactccaccctgggcaatatggtgagaccccgtctcttaaatcaaataaaatcatgatacaataccactacccacctaatagaatggctgaaataaaatacattgacaacaccagctcctggtgaggatgcagagcaactggaactctcatacatgactgataggaatgcaaaatagtatggccactctagaaagcagtttggcattttcttgtaaactttcaaacagttactatatgactcagcaataacattcgtacacattttgcctagagaaatgaaaaatttcacatgaaaacatgcatgagtgtttagaacagttttgttcttattcaccaaaaactggaaataaccaaatgtctttcagtgagtgaataagtaaactgtggtacatttatacaatggaatactactgagcaataaaaaagaggtaagatacacacaagaagttgggtgaatctcaaaggcattattctgagtaaaagaagccaatatccaaaggttacatactatatgattccatttgtatgacattctccaaaaggtacaaatatcacaacagcatacagatcaatggctgccaagggtttggagttgggggagggtgatggaactgctttgtattttgattgtagtggtagttacaaaaactttgttaaaatttatagaactgccgggcacagtggctcactcctgtaatcacaacactttgagatgccgagtcgggaggatcatgaggtgaggagtttgagaccagcctggccaacgtagcgaaaccccgcctctactaaaaatacaaaaaaacagccaggcgtggtggcgggcacctgtgatcccagcaactcaggaggctgaggcaggagaatagcatgaacccgcgaggcggagcttgcagtgagccgagatcacgccactgcactccagcctgggcgacagagtgagactccgtctcaaaaaaaaaaaaaaaaaaatctataccatgaaaagtatgtgatgctgtatgtaatattttagaatttatttactgtttttatttatattgctaagagtcatccatattgtcgcatgttgctatggttcatttattttaactgttgtttctccattgtgtgaatttatccattttttcacccattctcccattgatgaacattttattgtttttgttcatgtgaacagtttgctctgaatattcttgttcatgccgcctattgaaattatgaatttctctaagtcatttgaacccaagacttagagaaattgttgggtcaacttttgtcctaaagttaaatattcatgtgttcaactttaggagaaaatgccaggccattttcaaatgttagacataatatttgatactgtgagaatgagaataagagtgtaaaagtggaagcatggagatcaatctttgggatgctcccactgcactctgctctttgtccaagagacttggccaaattccctcttttttagaagcctcacctcctcccacaccaggcacaatcagttttcctcctgtaggttcccaaggcacctgtttcatgccatactttaggtaattatcagactgtattgagataataattccttctagcaggtaggaagcttctagaaggcataggccaagattctttgtattctccatgcccaggacctagatgagcacaataaatatttcagtaaatgaacgttcttcctcaaatctatacccccactttcccagtatcagataatgaatgaaatttattctttctttaataatatagaatataattgcttgtttccatggtagttgccaatgccaaagctccttgaaggaaggaactacaccccttttttattatatccagcctttaatatagtgcttggcaaattgtagattcttgaaaagcgtattgaatatgtttaataaattgaaacttgcagcattttaagagtgtttattcacagcctgggcaacatagtgagactccatctctataaaaacattttttaaaaattagccaggtgtggtggcatgtatccatagtcctagctacttgggactgaggcaggaggattgcttcagctaaggaatttgaggttacagtgagccatgatcatgccactgcactccagcctaggtgaaaaagtgaaaacctgtctcaaagaaaaaaaaaagtgtttattctgaatgtcagttaccatggtccaatgctggagataaaatgtagaagatttagctacttataaatatgccatgatgaccgtagaacatatccatgcatgtggcttaaaaaacaaaaataaaacaattcttggatatcaaagggtgagatttcatttatattatataaagttcaaaagcagttgaaaataatctatagtgatagaggtctgaatagtaaatacctttagggagcgacctatagaacacgtgggagcctactaggatgctatcaatcttctatattttgatctgagtaggggctatatgtatagatattgcatatgtgaaagtttattaggctgtacgtaaatgatttatgtgctttatatagattgtatctcaataaaagtaaaaagcactataatggtggattcgtggcattatacatttgtcataacccatagaatggacaacaccaagagtgaaccctggtgtaaatgatgggctttcagtgactgatgctatgtcagtgtaagtttattgattgtagcaagcacaccgctttggtgcaggatgttgatagtgagggaggttgtgcatgtatggggatgggatatacacaatatccccaattttgctatgaacttaaaatttctctaaaaaatcaagttgattaattttttaaaaagtgaaaattaaaacagggcaggcatggtggctcatgtctgtaatccca

SEQ ID NO: 643 - DNA, 2882 bp, Homo Sapiens
agtggcagctcgctgggggacccaaacgctgtgctcgccgggcacatggagcgacagcctagaccgagctgccgcttcgatcactgccccctgcacccgccgtggccatcccggagccccggtggaagcaacgccgcggaaacatcatatttgaaaacaaggtggggccttcatcatatgcaaccttcatattttagggcctgcctctttctattccttgacataaaccggactcttcatgctaatcaggctggaagtgtatcataaggatgctgaagctaaaaacaatgtccaaggccaaataactgacaagaagaaggccaaggcatctagaaaccatgtcttctgattcacagttgatcatatttttctatcacctttgataaggcataaaatattattttgatgagtaaataaaaagactttggacacctgctgtttgtctaatttatggtttccttctcttttctctagttgatatgactatattaagccaagaaaaaagttagatttgacaaacggattttaacaattttatgcacagaatattttttaaagttatttttacgagtctacagttttacaagtttaatgacatgttcagagggactagaaaatttacaaataacatgatttataaaatccatgatttcccaggaatatttttgccaccacatgggggtgtagtgttcttaatatgtactttgcaggaattctgagcatctcagctgagcaagcctggggagcagcagggagaactggattttatgtgcaagtttgtcttatctgcaccaagcatgaggccaggaataggagtcgatcttaattcatcctccaagtgtctcaaatataaaattggctttgtgatattaatttgtttaaattgttcaatctcaggaaaaacttcacagtatgtatgagttacccacatacagcagcaatttcaacaaaagcagccatattagtatgtgccatgctatattctccagtccaagaaggttattagaaaattgtttaattgaggccaggcgccatgactcacgcctgtattcctagcactttgaggccgaggcgggcggatcacgaggtcaggagatcaagaccatcctggctaacactgtgaaaccccgtctctactaaaaaaatacgaaaaactagccgggtgtggtggcgggcgcctgtagtcccagctacgcaggaggctgaggcaggagaatggcgtgaagggcgcttgcagtgagcggagatgcaccactgcactccaccctgggagacagagtgagactccgtctaaaaaataattgcttaattgagaaaaagttgcttttgtcgctggaattactgtgagataattgaccgtgatgggagctgtgtcccccagatgaaagcaaatcatgggagccagggtcaatcatattaatgtctgcagtgaaaagaggtgttgtgatcatcataagacataaccataaaatacttaaagtcttaaatggccaaagcctttaaactacattataatgattacagatccaataaagtttaattaaaacaaaactactacattgaacatccataatgattagaaaggtttctaattggggacaaatttggtattgagaacacatcaaaagaatttcccacgttctttgttacatctgtttgtgctggttttctgcttctgcatctgtacagggcacatttctaaaaaactgaccagtttaaaaattactttttaagtttataatgctcattttaggtaagtcattaactctttccataatttaggtgatcatttaatgttttagggattgggaagcacagcttacttttagttaaaaaaaaaaagcaaaaaaaaaaaagcatgagctttggaatcaggcagcctggggattctaggctagaattctaggtttctcatgtactaattgtgcaatttaactgcataatctctctgtgtccatagggtcctcaaagaaaataataggaaattatggataggaaataggaataataggaaagatggaattccaaagataatgtaataaagggaggtatgataggttaggggaattaacaaggaataatgaagcactccggaacccagcagcagcagcagcagcagcagcagcagcaagaaacctttactatccctaaggattagggcaagagagaagaaatagggagttacagtctgatgagaagaggagccttggaagaagtgttgactgacaggagctacggttatggagtgaccaaccccagtcactactatggcagaaaataaataccctggtatttttcttctcttctcttctgatctcttgcaggaatcaccctttggccaaacccaattagacaaccagaaacaagtcagcaaaaaaaaaaaaaaaaactctgggtggtgcagtcaatagtggtaagccctctaggcactgaaaaaaggccagagatgagcagaggaattgttctgtgttaggggggatgaaagtagaaaaaagcaatttacgctctttgtttctttttcctcatcttttcttttctttctttcttttatgaggcagagcctagctgtgtcaccaggctggagtacagaggcgcgatctcggctcactgcaacctccacctcccgggttcaagcgattctcctccctcagccacctaagtagctgggacaacaggcacgtaccaccacacctggctaattttttgtatttttggtagagacgggtttcacagtgttagccaggattgcctcaatctcctgaccctcgtgatctgcccgcctcggcctcccaaagttctgtgtttactggcataagccacagcgcccggccctttttccttgtttctaagtggagatatgaatcaactcttgtccaacaaaa

SEQ ID NO: 644 - DNA, 3196 bp, Homo Sapiens
acgtgctggccctgtccacacagacgtcgactccagcaaaaatgtcctgactgacttcaggagagaggaattattgctacgtgcctctttcccagtgaagaaaatctctgttggctgcgagcagagaagcggcggaaggattcccgactccgggaagccaggtgtcggaaggaggaagtacgcttgaagggggtccggctggccgactctgcactcgtccgttcgtggcccaccgtggtggtcaccaaattgagggcttcctggaaggacctcctcacggtgcccatccactgggtcatgtgggtctgggccactgtgagtttatctcccaggtaatccatggggccagccaggaggagagggaagaaggaagttagggagggagagagcaattaaaacgccagtgtcctcttgcctctttggactcttttgctcatggaagttttgggcttgcttggaggaaaaaaaattaaaaacagcagctttcttcaggcaaaccaagggtaagtaaacatccctgagccaggagccggctgcatccacgggtgccgctcagaattaagaggcagctaagtgccaggctgggagtccaccccagcggagttataaagtcaacacactgggcagtccaggttccagttccagggctcacccagctgatcggccgagacaaggagctttgaggaacaagccggctgcactcactccagggcgtgacggtcccgaaaggcgggggatggggatgggggtgggggtggagggggcggcctttgggcaccctcgtcctcacttcccttcaggtaggcagcccccctgaggtgcaccctgggaggttccggtgggcaagctgccgcaccctgctgccccctgcccggctgccctcggccagaccccgctcacctgacccatgcaggttttctgtcctctggctggagattccaaacctgtcggccggcaggcggctagctcacttccggaggcagccaccagggcccccgggtcccctggctgagcagcccgggatgacatcagcccccgtcttagcgaggggcttcgctgcccaggaatgcaggaggggcctcggggaggcggaggcggtggcggcggccgcccagggagctgacgtccgcccccatttttttctcccccaagtcccaactcgctcacggtccctcggggctgatggcaacttcacgtgcctgccagcctacccacccctgtgccctcacagcaagcgcaccaggaaatgcggctgcacgtgtgtgcatgtgtgtgcactctgtgtgtgtgtgcgtgtatgtcggcgatctggcagccccgggaaggttagcactgctgggaaacggcttctgcctctaaggttacaggcagcgtcttgggacctctggtcggctgtcagtctgtctccctctcgtggtctgtttctctgttgatttctcagcctcgctctcctccctctccctgtgtctcaacttccacttgcttgtctctaagcgtctctcctctctctctccttttcagctgtctctccctccctctctggaaggcaacactgatccaggtgagacagcctctgaggtcccccaggaaggactggggagggctgtatttcagtacaggcggagttgccatggcaacccggggcacagcatctgccctgtcctgggcagcaggctcagcactgggagcaatgggaatgattcatggtttacactaggtcacgtgagctccctgggttttaacccttacagggctggagtactaggggttgggggtacgactagaccctaacacccactgtcctcggccaggccccgctcatctgacccatgcaggttttctgtcctctgcctggagatcccaaacatgtcaggggttgttagaagggggtgggcagcagctggatcctggaggtcaggcacacctgttaaaggaggtttctccttctagcagggatccatgtccccccaaccccactacttttacagacaaggaaatgcagattcagagacatagattcacttgcccaaggtcacacagcaaggatgtcaccaggcatgcaccagagctgctcccaccccaggttttcccaggtctgacatggtacctggcccagagtcagggctctgtaaatatttattgttcggacaccaagtacacaattgaaacccaggtcgctcagaatgcatcctatgtcctttccaccaccacctcacttcagttttgaacaaatatttgttttctagacactggtcaaagggcctcacttgagaaagtttatcacaaaggactctctggcaatatggccaacagatctctttcttttctatgtattcccagtccttacagctattcattctctttctctccctgtctctcttcttctttttttggatacaggatctcactctgttgcccaggctggactgcagtggcatgatcacagctcactgcagccttggcctcccaggctcaagcgatcctcccacctcagcctcctcggtagctaggactacaggtggagcaacaccgtcagtcagaaggcagcggatggcacagggcttccgcgtaaggcctgcatcgcctgagtcatggttttctcatcttgtatgaggcccacccccttcaaaaggttgtgacaaaaaaaacaactgagataatttgtgccgctggcacatagttaacactcaataaggccgggcgcagtggcttacacctctaatcccagcactttgggaggctgaggcaggtggatcacttgaggccaggagttcgataccagcctgaccaacatggtgaaaccccatctcaactaaaaatacaaaaattagccaggcatggtggtgtgcacctgtagtcccagctacttgggagcctgaggcaggagcatctcttgaacccgggaggtggaggttgcagtgagcggagatggcaccactgcactccagcctgggcgacagaacaagactctgtctcaaaacaacaacaacaacaaaataataaatggtgaccacaagggatgatcgtttttctattataattcctatcatctcactgttcaaatgaatcacaggaccctagacagtcagaatcaagacaccagcagggaccaacctaggccaaccttcccactaaactgaagaaacaggcccagaccgagggctgccctaaggcctcacagtccatctgcagcagg

SEQ ID NO: 645 - DNA, 2469 bp, Homo Sapiens
acttctctgagatgagggcggcaacaggagcaaatgcgagcagacagctggcagaagttctgcaagatgacctgggaataaagttggccaagaagcctccgaggggagatcggcgtggtggagagccccgcgtctacatgaggtgtgagatcccaacaggttgacaatggaagcagagctgagaatccggtcatcttatattaagccagatgctaaaaaggtttgaaaaaatcaatggactcaggctggtctccaactcctgaccttaggtgatccgcgtcggcctcccaaagttcttggattacaggcgtgagccaccgcacccagccaggcagactgatttcaattcttttggttatacacccagtagagagatggcgggatcacatggtagtcctctttttaatttttttgagaaaacttcatactgttttctataatggctgtactaatttacatttccattagcagtgtgccagggttcccttttccccacatcctcaccaacacttgttttcttttgtcttaataaaagccattctgacaggtgggcggtgatacctcattgtggttttgatttgcagttccttgatgattagtgatattgaacatcttttcatttacctgctggccatttgtatgtcttcctttgagaaatgtctattcctgaatagcttttgcccattttttaacagagtcttttaaaatattgagttgttttaggtcctcatgtattttagatattccttatcagatgtatggtttgcaaatacaatatttcctctcattctgtaggttgtctctttactctgttaatttttccctttgctggacaaaagcttagtttgatgcaacccattcgtctatttttactttggtcacttgtggtttttgagtcatattttaaaaatcattgcccaggccaatgttatgaagctttctcctatttccttctactagttttacagcttcagaccttatgtttaagtctttaatccattctgagttgatttttatctatgatgtgagataaaggtccaatttcatccttctgcatgtggacatccagctttctcaatatcatctatcgaagaaattgtcttttccacatgtatgttcttagtacctctgctgaaaatcaattgatgttaataaattcagtcaagttgcaggatgcaaaatcaacatacaaaaatcaataggatttctatatactaacaatgaactatcagaaaaagaaataaaacaattctacttacaatggcttcaaaaaaagtaaaatactttggaataaatttaaccaaggagatgaaagatctgtgcactgcaaactttaaaaccttgatgaaagaaattgaagacacagataaatggaaggatattctgtgttcatggattggaacaattaatattgttaaaatgtccatattaccgaaagtcatctacagattcaatgcaatatctatcaaaattctaatgtcattcttcacagaaatagaaaaaatagtcctaaaattcatatggatccaccaaaagcgctgaatacctaaggcaattgagtaaaaggaacaaagctggaggtatcacacactatctgatttcaaaatgtactgtaaagctaaagtaattaaaacagcaaggtcctggcataaaaatacacagactaatggaacagaatagagagctcagaaataaataccctgataaatttatcttcagaaagttattattttctaaagttgagtactcataatatgagagaacatgacttgactagactgagttttatctctgaaccaggaaacagtggacacatttcaagatgggtaactgtaaattatggcctctcttaaggatttctggagctggttttaatgtttcaaagaatctcaaaatgcgctaagagcagaggggcaagtgtgtaatcccagccttttgggaggctgaggtgggagaatcacctgagcccaggagttcgagaccagcctgggcaacatggcaagagcccatctctacaaaaatttaaaaaattagctgaatgtggtggtgcacacctgtagacccagctacttaaagggctgaggtgggaggatcatgtgaggctgggaggttgaggctgcagtgagtcatgattacaccactgtacttcagctttggtgacatagtgagaccctgtctcaaaaataaaacaaaaggtgtgattgttaaataaaaagactaattttctcacaatctgcgttagtttactagggataccataacaaagtactacaaactgggtagtgtaggcaacagaaatttctttcttcccagttctggaagctggaagtccaaggtgtcagcagggttgatttcttctgagggcctttttccttccttccttcctttttccctccctcccttccttccttccttccgagacagagtctcactttgtcacccaggctggagtacagtggtgcaatctcg

SEQ ID NO: 646 - DNA, 2489 bp, Homo Sapiens
acttctctgagatgagggcggcaacaggagcaaatgcgagcagacagctgggtgtgtccctttccagcagagggaagttctgcaagatgacctgggaataaagttggccaagaagcctccgaggggagatcggcgtggtggagagccccgcgtctacatgaggtgtgagatcccaacaggttgacaatggaagcagagctgagaatccggtcatcttatattaagccagatgctaaaaaggtttgaaaaaatcaatggactcaggctggtctccaactcctgaccttaggtgatccgcgtcggcctcccaaagttcttggattacaggcgtgagccaccgcacccagccaggcagactgatttcaattcttttggttatacacccagtagagagatggcgggatcacatggtagtcctctttttaatttttttgagaaaacttcatactgttttctataatggctgtactaatttacatttccattagcagtgtgccagggttcccttttccccacatcctcaccaacacttgttttcttttgtcttaataaaagccattctgacaggtgggcggtgatacctcattgtggttttgatttgcagttccttgatgattagtgatattgaacatcttttcatttacctgctggccatttgtatgtcttcctttgagaaatgtctattcctgaatagcttttgcccattttttaacagagtcttttaaaatattgagttgttttaggtcctcatgtattttagatattccttatcagatgtatggtttgcaaatacaatatttcctctcattctgtaggttgtctctttactctgttaatttttccctttgctggacaaaagcttagtttgatgcaacccattcgtctatttttactttggtcacttgtggtttttgagtcatattttaaaaatcattgcccaggccaatgttatgaagctttctcctatttccttctactagttttacagcttcagaccttatgtttaagtctttaatccattctgagttgatttttatctatgatgtgagataaaggtccaatttcatccttctgcatgtggacatccagctttctcaatatcatctatcgaagaaattgtcttttccacatgtatgttcttagtacctctgctgaaaatcaattgatgttaataaattcagtcaagttgcaggatgcaaaatcaacatacaaaaatcaataggatttctatatactaacaatgaactatcagaaaaagaaataaaacaattctacttacaatggcttcaaaaaaagtaaaatactttggaataaatttaaccaaggagatgaaagatctgtgcactgcaaactttaaaaccttgatgaaagaaattgaagacacagataaatggaaggatattctgtgttcatggattggaacaattaatattgttaaaatgtccatattaccgaaagtcatctacagattcaatgcaatatctatcaaaattctaatgtcattcttcacagaaatagaaaaaatagtcctaaaattcatatggatccaccaaaagcgctgaatacctaaggcaattgagtaaaaggaacaaagctggaggtatcacacactatctgatttcaaaatgtactgtaaagctaaagtaattaaaacagcaaggtcctggcataaaaatacacagactaatggaacagaatagagagctcagaaataaataccctgataaatttatcttcagaaagttattattttctaaagttgagtactcataatatgagagaacatgacttgactagactgagttttatctctgaaccaggaaacagtggacacatttcaagatgggtaactgtaaattatggcctctcttaaggatttctggagctggttttaatgtttcaaagaatctcaaaatgcgctaagagcagaggggcaagtgtgtaatcccagccttttgggaggctgaggtgggagaatcacctgagcccaggagttcgagaccagcctgggcaacatggcaagagcccatctctacaaaaatttaaaaaattagctgaatgtggtggtgcacacctgtagacccagctacttaaagggctgaggtgggaggatcatgtgaggctgggaggttgaggctgcagtgagtcatgattacaccactgtacttcagctttggtgacatagtgagaccctgtctcaaaaataaaacaaaaggtgtgattgttaaataaaaagactaattttctcacaatctgcgttagtttactagggataccataacaaagtactacaaactgggtagtgtaggcaacagaaatttctttcttcccagttctggaagctggaagtccaaggtgtcagcagggttgatttcttctgagggcctttttccttccttccttcctttttccctccctcccttccttccttccttccgagacagagtctcactttgtcacccaggctggagtacagtggtgcaatctcg

SEQ ID NO: 647 - DNA, 1377 bp, Homo Sapiens
ccatatattcattaatcaacttgtctcatagagtgtaatagccactctaattatttttttcaaagtgttctcagctgttcttatttgtgttttcatctataggagttctgcaataaaatgcctgctttctccaccagatggtatgtctattgggacaaaattaaatttttgaactacttgtaacaaattgatgattgagtaatattgagtttttctatcttagaacatgatgtggttttccacttttttatgctgattttctcatatttcaaaaactttttatgatctttctcatactttttacaaatttttgttagatttatgtatggctagtttattttactttgtactgttaaaaagtaaactgtagcacaatacaaattttaaaagttttattggctgggaatgatggcttatatctgtgattccagcactttgagaggccaaggtgagagattacttgagcccaggagtttgaggccagcctgggaaacatagtaagaccctatctctatgaaaaaataagaagaaattagctgggtgtagaggtccattcctgtacttgtagctactcatggggtaaggtgggaggatggcttgagctcaggatgtaaggcttcagagagctccgattctgtctatgcattccagcatgggcgacagagcaggaatctgtttcaaaaaacattttcttgagtaggaagcaactaatgaattgtggaacatgagaccaaaaaaggtttagcatttaaatgacaaagtgtcagaggtaagattgtattgaaaatatgcagaaggaaaatattaaagttatttgattagttgcagttaaaaaactgtcttttttggtttaccttatagacatatattactataccttcttgggtacttctgataaacttaagttctgttattgttgatttttaatacaggtattcacaaaaatagctcacattatgttttgcttgtttgcaagtcaacaagatgaggtcaccgaaaaggtctaactgattctgtctgctcaggaatgtttcaggcttggtctcccttttaatttacctcgtaaatcattttgtaatttttatctcctacccattctgtaacttgttaattacttttatacacatgtaatatcttttatgtgtgatttctaagtatattactagtgaacattgactgttacaaggcataccttgtcttattgcaatttattgtgcttcccaagtgttggatttcttacaaattgaggggttttggcaaccttaccttcagtgactctgtcaacaatattttttccaacaccatgtgatctgtgtgtgtgtgtgtatctttgtcagcatttttatcaataaagtacattttttattaaggtatata

SEQ ID NO: 648 - DNA, 3701 bp, Homo Sapiens
ggattctggaggaggcctcggcgcgcagctgggcgagtactaactgtttgcactctcatcagacctgcctcggtcatgggagaagttgaagactttctgcaatgcagcatcttcaagcaatacacacatggatgaaaatcctaaagtttgcatgaaggaccaataacgtgcctagaaacaggcaaagtgagggagctcctttgctagatgatcttcagagcctctcccagctgtgaccagaaatggaaagccagagaaggtaagtgacttgccaaacttatggaatcagggcactccagttggtgggctgggctgataaacagaaatgttacataaaatacttctctcctgatttaacaacaattaactttagggaattataaaacaagatggaggctgggcgtggtggctcaggcctgtaatcccagaactttggaaggccaaggcaggtggattacctgaggtgaggagttcgagaccgacctgaccaatatggagaaaccctgtctctactaaaaatacaaaaattagtcagacatggtggtgtgcgcctgtagtcccagctacttgggaggctgagacaggagaattgcttgaacccaggaggcagaggttgcagtaagccgagatcatgccactgcactccagcctgggcaacagagcaagactcaaaaaaaaaaaaaaaaggtggaaataaaatattagacaaataaaaaattttaagttattaggtagaggtagcgacatggagtgaacggcctttctcaatttcataagtaagaaagatagataattgatggaacttaggctttggtaagtatttattttaaaaatttaagggtatctctttgctagtatatataattcccaaactagtagacagggggaagggaataaagaaaacacaatcaactcaatagaaggcaagaaaagaagagaataaagaagcaaagaacaagcatggaaaataaaactcacaacgtaaagtgcaaaaattaaaggcacacgactcaacagcaaaaaagcaaaagaagaaatttataaatgggcaaaggacctgaacagatacttctcaaaagaagacataaaaatgaccagcaaaaatgctcagcatcacatatcatcagggaaatacaaattaaaagcataatgagatgtcaccttacactgttagaagggctataatcaaaaagaccaaagacaatgggtgtgggtgaaaatgtggaggaaagggaacccttgtacactgttgatgggaatgtaaattagtgcagcctttatggaaaatagaatggaagtttcccaaaactctaaaaacagaattaccatatgatccagcagtcctacttctgagtatatactgtgaaccctgaatatctgagacagttctcagttaatttagaaagtttattttgccaaggttgaagacacacactcatgacacggcctcaggaggtcctgatgacatgagcccaaggtggtcagggcacagcttggttttatacattttagggaaacatgagacataaatcaatatgtaagtgtaaggtatacactggttctgtccagaaaggcgggaaaactcaaagcagggagggggcttccaggtcactggtaggtgaaagacaaatagttacattattttgagtttctgatttgcctttccaaaggaggcaatcagatatgcacctatctcagtgagcaaagggatcactttgaatagaatgggaggcaggttgtccctgagcattttccagcatgacttttccctttagcttagtgatttgggggccccaaaatttattttcctttcacaatactcaaaggaattgaaatcactatgtcaaagagatatctgtgtttccagaaagaggtcccagtccagaccccgagagagttcttggatcttgtgaaagaaggaattcagggtgagtccatatagtaaagtaaaagcaagtgtattagtaaaataaaggaataaagaatggctactccataggcagagcggcccgagggctactggttacttgctgttatggttatttcttgattgtatgctaagcaagtggtggcttatttatgcctccccgttttagaccatttagggtaacttcctaacaggtcatggcatttggaaactgtcagggcagtggtgggagtatagcagtgagaactctcgttgccatcttggttttggtggggtttagctggcttctttacagcaaactgttttatcagtgaggtgtttatgacctgtatttggtgccgacctcctatctcatcttgtgacttagaatgcctaaccatctgggaatgcagcccagtaggtttgtttcagccttattttacccagctcctattcaagatggagttgctctgcttcaaatgcctctaacatctgtaccccataaaaatagacaattattatttgttaattaaaaataaaattaaaaagtgtatcatgaactgtgttccctgtcattaaatgtgtgccttccccactaaaaacatacgttagtgaacacagtaaatgttaacagatttaacatttaattaatttaattaattaattaattatttaatttaacatttaactgttagtctatcctaacagttaaatgttaacagatttaactgttagggtagactctcagattagaatccaattggaagtgttttgttttgttgttttaatctagctatgttgcttttcaaaggtacacctaaaacaaacttatagacaggttgaaaataaagagggaggatagaataatatatggcaggcaaccaaaagaaagttgttaatgcatataaaagttagtaaagaaacattaaaaagatgcttttaatggtaaagagaagactcattaaagatagaatactattcacctataagcaactgacaacatagtcccatattatctagcacaaaaattgacaaaatatgaggaaaaattcaaaatccataattattacagaggatttggagtacctctatcagaaaacaataaatcaagtaggccaaaaagcatatgaagaatatggaagacttaagtaatatattaagaattgtgatctctgaaaaacagtgacccctgaagaatagattgtttccaagcacatttcaaatacttacaaaaacttgaccattccctagaccacaaagaaagtttcagcaaactcagatcctatcacatagaccagattttctgacctcgtaattccagtagaaatctatgaatttattcattttctacacatacatacacgttcgaaaatcaaaacacactctaaataattcatgagtttacatacatctgagaatgggcaagacccaattatgtctgttgtcttcgtgtgattattaatagcactcttccactcactgtcaaacatgtcccagtttggttgatacgttatgtggacatcctatttaaaaggaaaattataaaacatttggaattaaatgacaagaattccctgtcaaacttctgctttactcctgaggtaataatttgagggaaaacagcctggaaaaaataaactggagtttcaactcaaagagtaggataaaaagaatcaaaagggaaatcacaggcaccaaaaaatacataaaaaggggtgacaaaagtaaagacagacactgatgaaaatgagaactattgcattagttttctgtctagctgcattcgaagctggaa

SEQ ID NO: 649 - DNA, 853 bp, Homo Sapiens
atggcttctgcagggtggactggcctccttccccctatatgtgtgtctacggctgacctgtggctttgccgaggctgggaagctgctggtagtgcccatggatgggagccactggttcaccatgtggtcggtggtggagaaactcattctcagggggcatgaggtggttgtagtcaggccagaggtgagttggcaactgggaagatcactgaattgcacagtgaagacttattcaaccttatacaccctggaggatctggaccaggagttcatggcttttgccaatgctcaatgggaagcagaagtacgaagcttattttctctattaatgagttcatccaaatgtttagaatttaatttttcacattgcaggagtttgtttaatgactgaaaattagtagaatacttaaaggagagttcttttgatgcggtgtttctggatcctttagctatgtgtggcttaattgttgccaaatatttctccctcccctctgtggtcttcaccagaggaatactttgtcattatcttgaagaaggtgcacagagccctgcttctctttcctacagccctagatatgtctcaggattttcacatgccatgacttttaaggagagagtatggaaccacatcttcttcttaaaggagcatttattttgcccatattttttcaaaaatgccttaaaagtagcctctgaagttctccaagcacctgtcatggcatatgatctctacagccacacatcaatttggttgttgtgaatggactttgttttggagtatcccaaacctgtgatgcccaatatgatcttcattggtggtatcaactgcaatcagggaaagccagtgcctatg

SEQ ID NO: 650 - DNA, 1469 bp, Homo Sapiens
gaatgaactctaatgtaagctatggatttggggtcataaatgtgtataaatgtaggtttgttgattgtaacaaatgtaccactctcttgtatgaggctgatagtcggggaggctatgtgtgtgtgtcagggggtgcagagtatagatgggaacaccctctactttgtactcaattttgctgtgaacctaaaacttctctgaaagataaattttattttgaaaaacactatgatacactaaaacttcttttgtccttatttggtaatacttagaaatataattttattaagattatatttaaaagtagagtcaaaagatatgcatgttttagtgaaatatcttctattgttattactatcatcatagttattattatttgacttagaaatcctcagtagacattatgaaattagagatcagtaatgttctagttgaaaaagacatatacttgataaaattgcttcttattcttttggcgttactgtggttaagagtcttgtgctgtaatgatctcagttaaaaatagtaaaaagaatctcttgaatattgtggtggactctgcacagttcatgcaacaagaggcatggttacctgcccatatagctttgtttgtatcagccagttgaaatgtcaacatggttccttatccactgaataatttcacaaccctcctcttaatttggttgctttggacacattctatcctggaaacaaaatctaggcttcataatacattcggaaataatagattcatgttctttttttccagctggtactggtagagtttacacatttactcctgcaccataggaacagctgcttaaaaagctgaagtgtgtatttgattccattacattggcacaatagaaagtcatgtaaaagagggagactctctcagcttctccatatttggaaaattaattcttttaagtgctttaaaaaaaatctctacaggtggtcagactctatgaacttaggaccagaaatgacctcatcaccttcagctggtctaaagttgtctttggctgctgcacacttcacaaaatcttgttaattatgattgtttttcctagttataagtccttctggatacatttttatagcatttatttttatcgcttacataactacataaaatattttcattggtgtcaaaatgtcatgttattgccaaatagattccatttcaatttctagaaattattggaaagttaatacccacattttaatggcacccttgctgtggtattaaatcatgttttattgaaattcacaagaatcaaaattacgctgcgtttatccagaataaagcactagaacagttactttttggccgtcttgcccattaatttctatgcttgcactttctctttagacaaacaatgaatgaaatttagtgtctttctagaattgaattctcatgaaagtgattgtcatatacacactcatcatctacttctcttttcagc

SEQ ID NO: 651 - DNA, 2531 bp, Homo Sapiens
aggcactgctggcatcctggccggctgcgtttgcactgcttctccaaaaccacattataggtactaaacaacattgtttagtacctataatgtgctagactcctggctgctagcgaggtaaagttaaacatagtttctattactgagctctcgtaattattgtcataacaccacttagattgtggaaatatctgtcctcacaccccttatattaaaggtgtgtgcatttagaaagcaaaacgtcttgttagcattaaaaatctgaatcgtggctgatttcttttcttttctttttttttttttcgagacagtgtctctctctgccgcccaggctggagtgcagtggcacgatctctgctcactgcaaccaccgcctcccaggttctaagcgattctcctgctccagcctccggagtagctgggattacaggcgccacaaccacgcccggctaatttttatatttttagtagagacggggttttgccatgttggcccggctggtctcgaactcttgacctcaggggatccacccacctcggcctcccaaagtgctgggtttaatggcgtgagctacagcgcccggcctgatttcatgttttatgtgaaattaacttgtttgcctgggttaacagtaattaactgataattacataatatttatcaattttttcagttaattgctgacagtgtaagaagaggagccaaatccatttcagacacagtatgcaattgtgttttaagccccaagagtagttactttaaaaaagctcacattattttaaatttcaaaatacatgccaagacagcttgtcattttctttggtaagacatctaattaagtagttaactaagaatcaaatctgtgaagtaggactaaatagtagtgggcttcctgtactagataatatacatatatggtctttatgctgaaatgtattatgtgcctactttatttttgtcttagtctgttctgcataggtaaatgtttggattatttcaccaagctgactggccagtatcaatgttaccagactactgggtaaaattattaataatgaaagctaatgttttgtggtttgcacagtcgcattgtttttgtctctgcttagacaaaattataaactggtcttttttttttttttcttttttttgccttgcttcaccacagtcacagagtgaccctctctgattagttggtgttcgataggaaaatcatagcctagttgtgaatgtcaagctatctcccaacactgtggtgtagctgtgtcaggtcagtccctggatgtcagggatgattttctcatgactattagatctggctaaaaaatgcatattaaatagtagtgtcagtgaactgaccctttagatgaatattttcccttctatttttttcagtgaccaattatagatgtttttctccataaaagttattctagcttaagaccaaaataatttagaggagttaatataattaaaatacagtagttcttatatgcaataggcagtttcagttaccaagggttaaacatgatcttgaggcaggagaatagggtctcctattgaggcagggaacctaaggccgattcatgctgacttcctagagctaaatcaaaaggaaaaccccaacttcccatacctaagtaacaaaaggacccaaagctacgccctttgcaaacccctctttttttctgcgtggcagatagaaaattgaaagtatctctgcttggtagctttctgcaaccaatcagacgtttgcgtaggagtgtaactttgtaactttgcttcagcctctaattggttgtttttcacaaccaatcagactgattgtgggctagtacttcatttacatttacataaggtgtacaccaagtaaccaatgggaaacctctagagggtatttaaaccctagaaaattctgtaaggaggcccttgagcccctatgctcagatggttcccaccctgtggcgcgtacttttgttttcagtaaatctctgcttttgttgcttcattctttccttgctttgcttgtgtgtttttccagttctttgttcaaaacaccaagaacctggacaccttccaccggtaacaatccgaaaatattaaaaagaaaattccagaaatattcataagttttaaattgcatgccaaagtagcatgatgaaatctcatgccatccagctccatcccacctgggacgtgaatcctccgtttatctagcatatccatccatgcaatagacattactctcttgttagtcacttaggagccattgcagttatcagatggactgttgcagtatcacagtgcccttattttagttctattacaatatattgttataattgttctattttattattaggtattcctcctaatctcttacggtgcctaatttatacattaagctttatcataggtatataggaattggaaaaaaatagtatatatagggtttggtattttccagggtttcaaacatccactgagggtgttggaatgtatctccaaggataaagggagtgggaggggc

SEQ ID NO: 652 - DNA, 2283 bp, Homo Sapiens
ttctcctgcctcagcctcccgagtagctgggattacaggtgtgagccatccatattatataggtatattaaaatatcacattgtaccccataaatgtatacaactctgatttgccatttaaaaatactattaatacttttcttagaaaaaagagagaaataaactttaagaattgggccagagaaaaaagtgtttttttcatcttaaaattcaagacaaaaaatatttaaaaattttaatggaatgatatagtgacaaaacctatcaaaacctctgagatacagcaaaggccgtgctaagaggaaagtccatagctttaaatgtctacatcaaaaagtctgaaagagcacaatatactaaggtcacacctcaaggaactagagaaacaagaacaaaccaaacccaaacccagcagaagaaaggaaacaacctagctcagtgcagaactaaataagattaaaaagaaaaaaagacaaatgaaacataaacctggttttttaaaggataaataacattgatggaccattagcaagattaagaaaaaaagagagaatattcaattaagcttaattagaaacaaaacaggaaatattacaactgacatcacagaaatacaaaagatcattcaaggctactatgaacacctttacacacataaacacaaaaatctagaggagataaattaattcctgcaaatgtacaaccctcctagcttaaatcgggaaaaatcagaaaccctgaacagaccaataacaagcagtgagattaaaatcgtaatttaaaaaattaacaacaaaagaagtccaagaccagacagactcacagcagaattctacccaacattaaaaggaaaattggtaccaatcctattgacactattccacacgacacggtaagagggaacctccataattcattgtatgaagccagcatcaccctaataccaaaaccagaaaaggacatagccaaaaaagaagactacagactgacctaatgaacatactggcatactcaattataatataaactaaaaaaccaaaacaattaactcatgtgaggtggcatatcctaaaatatataaaacaaaaatataaaattccaaaagaaaattaaaacatgaaatgtaaaacttattggacaccatcaagtacatcaatatattcattaaaaaactcttagaagaagaatgtagggaaaaagtaatgtagaggttacttgtagatgaaaaaggctaagaacttcccaaattttgatgcagtaataaaattcctaaccaagaatacttgattcaagattagtgtactttaaaaacagataaaaataaagacttttcaaaataaaaggtgacagtgttatgattcattatgactagcacagttctacatgaagggctacatagtagcctggcaaagtggattatttctgtaatcccacatctttagggaggccaaggcagtaagataacttgagaccaggagttcaagatcagcctgagcaacacagtaagactctgcatataaacaaacagaaatgctaaaatgagtccattatttaaaaaaaaaaaatgatgctggacagcatcataaaactatatataaatataaagctattaaatgtaaatatacacacacacatacaattctttactctcataatgatggagcataaaacctttaaagttattctatatgagaaactaaaaataagtctgcataaatctgtcgatacccaataaaaaataatagtttttaacatcaacaaaaaactggaaaacatattagtttttgcattaaattgaagttgttatgaaattaaaatatattgttttaactttaagatgttttatgtaatctccacttttcaagataattacattgtatttccagaaagtatgtgaaacaaattttaaaataatcaaagtatgtcacaacaaacttaaccaaaaattggcagggcaaggtggctcacacctgtaatccctgcattttgggaggccgaggtgggccgatcacctgaggtcgggagttcgaggccatcctggccaacatggcgaaaccccttctctactaaaagtacaaaaattaactgggtgtggtggcaggtgccggtaattccagctactcaggaggatggggcaggagaatcacttgaacccaggaggcggaggctgcagtgagccgagatcacgccattgcactccagcctgggcaataagagcaagattctgtctcaaataaataaataaataaataaacaaacaaaaataagcactaaaatgaacaa

SEQ ID NO: 653 - DNA, 4159 bp, Homo Sapiens
gttttgtcaaaggggactcttccaattccctgcctagggaatataaatctagttgccagtgccctaactgcaagtgagggaaaaagggtgggagtctcactaattagtatatggcatgtagacttgaccttgatcatcctttttcagccttactcctatcctctacaaaacatggtatcattgggtctgaaaatccctggctctatttccctagaaattaaaccagttgcctgctgggctggttggtgtacagaagaggagaaggattctgaggggtcatctccaatcccattttttttcagccccagcctgcatccctttctacagaagtaacaacaatttccagtttctgagcctttccagggttgtacagtaggtattcatttgctttttgatattttccacagcaaagcaaactttcttgctgctctgttaacttcgttaccactcacccgtctgccttctgtcttccaacattttgttgctagctcttgtctgctgttgcctcttctgttctctttatccttccaggttttataagattgtttttattccttttcagtcatttcagagaggcttcaggatggagttgtgataaacgcatgtgttcagtctacaatgtttaacagggagtgcctcttgattttttcatgtgaattactgaggagtaggtagtagactatcttgatgcccttcctcatgtccctttgactctgagttgacctgcagctgcagtgaacacttcctaaggatgctgatgtcttcccctatcaagcacttgcctcattctgcttctccgaggatttcctccagtacaccaagagcttgcccgacactcacaaggtatcctggaactgctggggactgaaaacccctcaacccatgaagaatgaggatcagtggattaatagcaactgtcccataccttggtgggactattataaggcattctggttggttcctcagaggtcccaaatgggattgaaccaaagttgcccacagtaaaaactcattcaccaactcaattttcatttcacccctctcaatttgcacactcactcacttgttctacctgggatactctccaagataaactcctgtatccaaagctttgtctcaaggtctcatttgggaggaactcaaactaagataataggtactggaagtgactacagaaagtatattatcaatggtatggaggcaacaaaaaccccattaatggtggtgagtaaggtggtgacaaaccctggcactttgaagaatttcattacccacaattgacccatggtgtacttggatgaggtaaaaatgaaaggagacgctaaccttatgcaatagtgctaactcctgaaagatatagggctgtgataatcacaggaattgaagagttgtcttgttcttgttaactcccctagaagaattgggaaaaaagaaagataggtttacaacatccaactacccattcagagcatagcaatgaaagccagaaggtctccttgggagaatctgaagagacccccatttcctgcaaccagagggcaggctgttctaaaaaaatgacattcaggggttcactgcaagaggaattgaactacagagcagactgaagacacagtccaggcaggcctctcatgcaaaagtcaaagccctagaggaaggaaatggtccttaaaaactactgggatgcaggcaggcatctggatagatgtgctagataaccttgaacccctagattccctgaacaacccaggctagcaggagtatcctgcaccctgttacttgaacagaacagcttccctttgcctagagactctacacagtcctcctctgaagcagacacctccaagattacttcaaggtctgctacttcctgccctcattgcctctattccaaaaactggaaacaagtctcagcatgccctgagcagggtagcacatttcttgctgtgagagatatgacagattgtattttctaaagaaggctgcaaccatgtctctcatcccaaatgctcttctacaatgcaatcttgtcactcctctaccaagagatgaaacctaatttcaatgcccttgaatctaagctggactttacttgctttgacctgtaatgtacagaagtgacactgtgtgattcttacagctgagtcataaaaggtgatgcagcttctgccttgttcctggggacatatgcctctgtgagattgagctactaaataacaagaccacctaccttgaggctgccatgctggaagaaagcaaagccacatgaagagcaagtaagctggttgctttagcaagatccttcatattgatagtgaatgtgcacttctgtctttctcttgtgaatgcaaaccactttttcaatagtctcacgttaagtgccaaagattgttgtttttgttgaatgcattctctttatcattcactacctggccctaggaatttgttcaatgatcctcatttctgttacaatatagtcttcagtgaccttgatcatcttcacattctatagaacatcatcctggcccattatattaatgacagaataataattgaacttggtttttaggaaggagcaagtatactggttttaaatacttcatgctgaaggaatgagagataagccctacaaagttttggaagtctgccacatcagggaatattttaggggcccaaagatccaggggtatgttgagacaccctactcaaaagaatactttacatttcctaccactaagacagaggcacagcacttggtgagctgctttgaattcctgaggcaaaaaaataacaataataaatactacccatgagaataatgctctgatctattgtatcagaagactattgactttgcgggggtctgagagagtatctgaatagccttttaaagacttaaaaaggcattggcttaggaattgcaccttgcatggctaggtcattgtcctcgaggatacagcatatttgttgaaccagtgatcactatatgcaatcactgtgctgttttcccagcatttggaatacacaggaatgataattaaaggatacaagtaggactgacttaaacacactccctttcacccattagtggaaattatgtttttaattcttacaactttaggctcttcctgattaaaagccttggtctcaaggtgtgtgtacagacggagacagtaagtgttccactgcatcaatgcagtgccatctgaggatttgggcatctccatactgacaggtcagcaggcaaaaatgggagtactatactggcagggacacctgactgattatcttgaagagtcggagttgctgctacataatgggcccagggaggaagatgtctagaacttgggggaatcactcaggccccccttagtgcttctttgtctggcgataatagcagagaagcaattgaagtagccatgtcctcacaagggcaaggtaatcaaggcccagccactcagagatgaaggtctggtcatacactgagcaagcaatgatgactagtggaagtgctagccaaggattcgggaaatctagaagaagtggaattggagagagatgatgagtatagattatagccttgggaccagctgcagcagtgaagattgtgacttgttccacatattcttctattttcagtcatttttggagattgcagccagctacaactctgaaatgtcagtaacagagcaaactaagggtgggcatgagaggatctgctgagagcaaggaatgaacatggtagtcactaatgatacactgcccatgttccccggctcacctgttagctccccggcagcttgcaaacatgtctatacacactgccatcttcctaccacgagtgccataactctctgcttctctgctgaggcccttctcagctcacagtgcgagtagcctgcaagtgctaagggcataatgcctccaaggtcaactttaatcaacgaggttcaagagtcagaagagtgaattccttctgagatacattctttctggtttctcagaggctccccagaggaagtaggccccagttgcttaggaaaaatggaacctacttattaaggcaccccctttttacttttctcctttctttctctccctttccccactccattccgtgaagttcctgggatcaccaaataaactatctgtaatcaaa

SEQ ID NO: 654 - DNA, 1273 bp, Homo Sapiens
ctttcacagaaagaaagtaacagacataattcctgttgatgaggctgggattgtttttaagaggagagataataacttcatatttttaaagtgccagtagcctaatatgtgaaacagatcagaatctgttgtgtagtaagtctgctttgttgaagaatttattatgggagtaaagataagaaggaaagagatcaccatcagaaacaagtcagccttttcatgcttttttgagcatttttggagatgattccacttctcaagttattatcatttgtgcatctcttcaatgctattgttaaatgctttagaattagaatattttgatcctttaattaaagtaagccaaacgtctaggcaaaaacagccaatcattaaactttaatagtaattcaaatatagatttctcatacagttttccatgtctgtagaaatcaaagttgtaatgttaagcagagggaaatgcgtgtgatttactaatacacttcaacgttctacttttgaaaggatactcatgtgggtggggcagagaacatagaaaaagatatgatggaaaacctgtccattttctacctgttaaccttcatcattttgtgccaggccctggaagcaaagagaggaagggaccgactgcatttatctttgaacacttgagcatcagtagtactactgagtggccaggggtcttgtctgtcaaagcaaatgataagttcactcaggccattattgactgctgaactctcttccttcccaactcttccttgaaagagaaaaaaatactttgccttcttgctctccttatcaaatgtttttgtacaaatagtgtaagcctgtttaagcaaaccaattaaaataggcactgattattttgatctgtttgtaacaaatgaatgtaagtactatttacatggtgtgcctaggaggagctgaaatcattggcactttaatccatattgtaaagatcagtatcaaaagcatagtgttcttcacctctcctcctcagcatccatctctatatacttgattaaatggaaaagtctcttttatcacctctatgtaaagttttatgggtagttatcgtcagtgtatttaaatatatcttctagtatgttttaaaggctggtcttcaatactgtggagacaaaaaataaaagagcgtatgaaaagtacgttagacttttgctggcattcaagtcatggctagtctgtgtatttaataaatgtgtgttatttatgtcgtgtttgtcaatggaaaataaagttgaatattctgaaa

SEQ ID NO: 655 - DNA, 1168 bp, Homo Sapiens
tttcccaggttttatcctaggatttttatagctttaggtaataatttgagattttaatccattttagtttatttctttatagggtgagagatatgggtccagtttcattcttctgcatatgccaatccaattccagcaacatttgtcttacatgcttccacagagttttctgtgagatatttagctatgtgaaaaagacaaagttcacactgagactaattttctcacatttatactatttaattctgtttgtgtcaccatctgaatgctatttgagacctaagtcacctgacacctgctaactgataccattttctttccccacttatgttttcattaagtgaaataacatagatactttaaaaatagaatgagcacaacttattgtagactaaaatcagataaatgtcacaaatcagtatatttaatcttaaactcctgtccccaaagtacaagatgtttacaacagattttatttctttacgattgctttgactgtgtatgggtataatattaatgtcttatttctagttatgttgttgttgatgatgattcttatggggtatgtcgacagggcaccacttaatctagaaaaaaatgaggggtggaggatataacactggaaatcatcaggctaagttaggagaaacacatgaataaaagccatcaaattcatgaaatgtagagagttcatgaagacctaatgaaaaatgtacatacatgaagaaggagaaattacataatttatatgtttgcaaacactgctttaagatgagagaaactcaggaggagcttaaacaaagtgtaggttctttttaaggagggaatgctctagaaatggggctttcaggtgcaactgtgaaacacacttgcaaataaagtaaacacattgtgaccctagagacagtattagggaggagactgagggtctaaacaaattattgtagcttgggtataaaaatagttcttgaagtctgcaagcaccagagtgcttccgagtactaatgaattcttcagtcactgactacagtcaattcagcaaagttgcatattcaagtaatcttgaatgttctgggactgctatttctgatcatggtctcagaaaagcatagctctctcctctggtactcagtgtaacttggtcttggagctgagcaatccaacagcc

SEQ ID NO: 656 - DNA, 2556 bp, Homo Sapiens
ggggccgggctgaaccatggcgggcggcggcatgggggcggtggggctccgcgggcagcctggttgcgctgcacccggacggggccgaggggacctgaaagctgcggcagagcctgaccgcgccgttctccagaagagccccggccgcggctgagtcgcgctccgggtgtggacggagccggagcctccccggggctcggtgaggacacagggcccaagccccggaccttcaagtcttgaccgagcgcatccccggcccttctgcgcccacacctgagtttttgtctgtaggagtttccgcagtttgctaagaatcgacatctagaggagtactcaccacttaattgatgatcaatacacgttccttgaaagaaccgatagcatgcgatcgatacagagcatctgcactgggattgtccgccccgcctgtcagggaggcctcgggggctaatggagctgagggtatagtcggccttggaccctcgcttttttcctttcctgtactatgaagataactgccttatctccccctcaggactgttttggggattaaataggacgtttaaattaccaacgctctttgaaataaacatttcaaaattattataaccctttagtacatgtgggaaaacgttgacattcatgttcaagtttatttttctgctggctcatttaggtttgttgaagccttgagtccctaggattgtctaagaacatgggtaaatgtgtgtggaggcctccctggaggccagagaactgccagcagccttcatgatgttaggggaacaggaacctaggagagccagggtgacatcgttttaaaatcaacaacccatcttggcgggcgcggtggctcaagcctgtaatcccagcagtttgggagaaaaaaattagccgggtgtggtggtgggcacctgtaatctcagctactcaggaggctgaagcagaattgcttgaacccaggaggcagaggttgcagtgagctgagatcacgccatggcactctagcctgggcaacaagaatgaaactctgtctcaaaaaaataaaaataaaataaaataaactccatcttaaaaccagtgaaaccaccattgcaaaattataactgagacagtgagagatctgacctaaccaactccatcctacttttaacctccaaactgtccttgttcattcctgggtgtaggccaaactaactttggaagaaacttagtttatggtttcccgaaacaaatccttttcttgtctggagactagactgcctttgtaggactaactgaatattctagatacttgtgaaaggatattgtggaggaggagctgggggtagtaagtatgatggaaggcagacgagttttggaatcttgtctccaaaacactctcatctgttagaatgactcctaggctataggattgactatggcttagagtggattcatagttgttaatttcatcatgtgacttgtgacttatccttttcttttcataatagaatgaaaattgccatctgtctggcttcttccccatctttttgccttctttcattacaccacacacgtgtcctaattattccaaaggtgatacatttgcctcactcctcagtatacacacctcttttagggatttctgggcttcttgactagctcaagctcttcagaggcatgcactttatcttggtgttcagtcttgactagtttaaacttttgatgtccagaaggttttcttcatgtgttgttgtgtggaattgtaaatattttctagcttttgtaaggttgtggctcatatttatatttctcctggtttgaaagaagagagagaaagaagtatgtcaaattgagactcttagattggaaatctgaatttatttacacgattgagattgatctagagttttattttttctgctgtaactgaaatttggattcaagattatatgtgttttgtgaatatgtttggtaacattgtgacttttctataatttagggaagtttgatgtaggagaaagagaaaaaatttttgagagaatcctaaattcatatatggcctaaccttttaatatctatgtaattttagataataaataatttgtttgagattatgtggctctaacaacacctgcttcacagtgtaattatgaggatttcatagaatttgtatagtgagcgttagttttgatgttactttaaacctctttgccttatacattctgttttttccatggaatattatatgatttcatgtccacatattaatctcatactttcaattacattttatgtttaaattgaatattatggtaatcgttatgtaaatgattaaaaatttaaagggacaacatttaatgttgctctggaattcacctttagtcataaaataaagatttaaagtatcatctgtagacaatggcaaaaggccttttttgtcataagaaaatcaaatatgctttatttcacccaattaacagtttctgggcttggccatcccgggaaaaccaaaatgaccataggcggtaattccccaggccgtgtgatctcagtctggcattctcagatctc

SEQ ID NO: 657 - DNA, 1843 bp, Homo Sapiens
tcatgctgttctcacgatagtgaataagtctcacaagatctgaaggttatataaagagaagttccctacaccacttctgtctttgcctgctgccatccacgtgatatgtgacttgctgctccttgccttctgccataattgtgaggcctcctcagccacacggaaatgtgagtccattaaaacctctttatcttctcagtcttgggtatgtctttattagcagtgataaaacggactaatacaataaattggtattggtagagtggggcactgttgtagatacccgaaaatgtggaagcaactttggaactgggtagcaggcaggggttggaacagtttggaggcctcagaagaagacaggaaaatgtgggaaattttggaacttcctagagacttgtttggctttgactaaaatgctggtaatgatatggacaatgaaatccaggctgaggtggtctcagatggagataaggaacttgttgggaactagagtaaaggtgatgcttgctatgttttagagactggtagcattttgcccctgccctagagatttgtggaactttgaacttgagggagataatttagggtatttggcagcagaaattcctgagcagcaaagcattcaagaggtgacttgggtgctgtttagagcatttagttttaaaagggaaacagtataaaagtttggaaaacttgcagcctgacgagcttataggcataagagacttgccttgtctcagatgaaactttggactgtggacttttgagttaatgctgatattaggtaagagtgtggggagtgttgggaaggcatgcttggttttgtccaagtctccttgaacagtgcttgcctgatatttttgggaatataaatccctgggtctcttataaaaaggtaggtttaaatttaactggtcagggatggggctgagaggctgcatttccaccccaggtgatgctgatgctgttggctcccagacaccactttgggtaacaagctcctacatcagaggtcaacgaactacggcaatagaatatggtagaagggaatgtgtgtcagccccaaatctggcctcaagaggcttaggcttacctgcttctgctttttccctcaggactctgcttaccctttgtgaataagcccagtgaatctgctgagtgatgagagagagagtgggccagtcacttcattgctccaggtaacatgcagttatcttcccccaggtaggtcccagaagacctgccaactgactggacatgcgtaagtgagcccagctgggttacctgagtctggcccaggtcagcagtgctagccaatggacaaacaacatcatgagcaaaaattaatgtattatatgccactgaggttttttggctgtttgttgtggtacattattatagcattagataatgatgcaaagtgcagaacagctttatttggcaggaagagtaggggatgtgtgctcactttccatttctaatcaatcaccaggtcttactcatcctatatcctggatgaatatctctaattcattcccttctcatcactgtccctgccactcacctaacctggttatcttcaccacttgaaacttctcatgctgtcgtatacaactgtgtacttccctcccaagcatcattataatttgctccagttttgaaagattctgaagccagttttgttgagagaggagggcaacagatgaacaatattgggcatctactttattctatgcacttaattaagcttattgataaggctaatcacagacttaaccataatcataataaattggcaaacaatgtttattgagcacttcttacgtgccaggtccttagttca

SEQ ID NO: 658 - DNA, 2876 bp, Homo Sapiens
agagggtgagggtcccacatctcctgcaggacaggccctagctactgagtcacagaaacccagggccgaagcaaagtcccaatcccagagaggctggggcacacctacaactgaaaggaggcttagaaatccttcagagaccaccctatcggttctcctccacctggacaggatgagccagcaacacagaaggaagaggccttcctccgaaaggtatatttgtaagccgagttgaatgctttgtggagagagatcccattcaggagggctaagcttgaatccaggacttactgaggagcaatcacacagaaaaggacagacacttcgagggaagtacctcagaatgagagccttgcattcatttactttggctcagtagctcctactcctatagcatttgggaaggaagaatgattgcctccatcccatgtaacacagctcatattatacagaaggagaatgcaaacttccttctctcaagcctctaaaggtggaagcaaacctaccttacaaacagcaggcttgctcctaatcagtgccgtgaagggaccaatgctgcctggtacatggagtcagtaggaggatgggcagatggccactagcatcagtgacaatgcagcctggagtggattcaacagacaacacagacttcccttcactctcatctctgcccccaccagaggcactgagtcactggcttaactgagtcactgaacctggaagggaccacgtcctccttcattcactcattatctcagtcagcatatacctctatgtgtcaggcactgtcatggccgctgctccagcaatagataggacagggcccctgccctcaaggagcttccagtccagtcagggctaccccttcaatgccacccccctgctggagagcctggatcttgggtaaggttccacatctgttactgctgtaacctggtgatgtcacttactcctctgtgtcttggtttctttatctgatatgaaagtctcatgacttgctgaataaatgtcataacatttcatttaactcagtttataatgttgcactagtcatcagattcactgagttcttcaaaaatatagctctttggcaaaattcattgttaaaaaataaataagccattgtaagcaatttttataaatttagtttgtttttattcattctaaaccatgggatgccctttggacataatacaataatgattctagggttcttagaaacatgctatttgtttccttccttatccctctggatgtgaagtaaaataataacttaaataacttgaagtaaattatactttaaaaagaatctcagccaggcacagtggctcacaactgtaatcccagcactttgggaaatcaaggtgggcagattacctgagattaggagtttgagaccagcctggccaacatggtgaaaccctgtctctacaaaaatacaaaaattagccaggcatgctggtgtgtgcatataatcccagctgctctggaaactgaggcacaagaatcacttgaacctgggaggtggaggttgcagtgagcagagattgagctacttcactccactctagactagtcaacagagtgagactccatctaaaagaagaagaagaagaagaatctcagatttataagatgagagattcagaaatatttggtttccaagatctaggcatatttggtttcagcacccaaaactttggacagcagcctcctcattctctcctggtagaactgacttgagagaaagcctggttagggctaactgattcttaacatctctctttaaccaaggtcatctcaattctaggaaggagagtgtgcccctggctcagataaaccagtgagagttgaagggtaccaaggacaaggtactcagatgacaaggctaaggggaaagctgcactgtgggcagcaggaagtaactggacccacatcagagctaacagcaaatattcacaccataactccgaattctcagatcccaggtagactctgacttcctcagaatcccactgtgatgtctgagcctcagagcaaggcttggatgccacagtgggctctcctgcttagttgtagtttgagtcactcctttgctcttttgcaccatttcagctaaatcctgtgcatggggtgtgggggtttctttagaccttgagccgaagctagaaaccagatttcaaaaaattctgtgagcagcattgagaagctataccagggagaagcaaggaccaggcttttcagtcaagcataactgagctattaagacacaagagactcaggcgtctgcctgtccgcatcaatctaaggaaaactcagcacacattgctgcagcaagcagaggtttggacatgggatgggctgttatactgtgcataatttaaccaacacatgtcggtggctgaatgctacaaaatccacttcttgctcaagtcttacatgaccagtagggggtcagcagggggctcttctccacatgtctttcaaggaccctgatggaggctgatggaggttctaccacagcatggctgcaccgtctggaatccatggccttctgggtcacctggcagggaaaggaggagatgaggagcctttggactggcaattaaatgctgcagcctagaagggacacactcatttcctttcacaatctattaatcagaaatagtcaaaagtgatggtccccaaaaaaaaggaagagctggctgtggctgagcactagaagattctgccacagtccctgctatggatgagtcctcctccccttctgagaccactcgtttcttcctgcatatttactgtacaaaaatattataacaatacaaggaataaaaatggaaaggaagccctccgcaattccatcactctaacaaatc

SEQ ID NO: 659 - DNA, 2878 bp, Homo Sapiens
agagggtgagggtcccacatctcctgcaggacaggccctagctactgagtcacagaaacccagggccgaagcaaagtcccaatcccagagaggctggggcacacctacaactgaaaggaggcttagaaatccttcagagaccaccctatcggttctcctccacctggacaggatgagccagcaacacagaaggaagaggccttcctccgaaaggtatatttgtaagccgagttgaatgctttgtggagagagatcccattcaggagggctaagcttgaatccaggacttactgaggagcaatcacacagaaaaggacagacacttcgagggaagtacctcagaatgagagccttgcattcatttactttggctcagtagctcctactcctatagcatttgggaaggaagaatgattgcctccatcccatgtaacacagctcatattatacagaaggagaatgcaaacttccttctctcaagcctctaaaggtggaagcaaacctaccttacaaacagcaggcttgctcctaatcagtgccgtgaagggaccaatgctgcctggtacatggagtcagtaggaggatgggcagatggccactagcatcagtgacaatgcagcctggagtggattcaacagacaacacagacttcccttcactctcatctctgcccccaccagaggcactgagtcactggcttaactgagtcactgaacctggaagggaccacgtcctccttcattcactcattatctcagtcagcatatacctctatgtgtcaggcactgtcatggccgctgctccagcaatagataggacagggcccctgccctcaaggagcttccagtccagtcagggctaccccttcaatgccacccccctgctggagagcctggatcttgggtaaggttccacatctgttactgctgtaacctggtgatgtcacttactcctctgtgtcttggtttctttatctgatatgaaagtctcatgacttgctgaataaatgtcataacatttcatttaactcagtttataatgttgcactagtcatcagattcactgagttcttcaaaaatatagctctttggcaaaattcattgttaaaaaataaataagccattgtaagcaatttttataaatttagtttgtttttattcattctaaaccatgggatgccctttggacataatacaataatgattctagggttcttagaaacatgctatttgtttccttccttatccctctggatgtgaagtaaaataataacttaaataacttgaagtaaattatactttaaaaagaatctcagccaggcacagtggctcacaactgtaatcccagcactttgggaaatcaaggtgggcagattacctgagattaggagtttgagaccagcctggccaacatggtgaaaccctgtctctacaaaaatacaaaaattagccaggcatgctggtgtgtgcatataatcccagctgctctggaaactgaggcacaagaatcacttgaacctgggaggtggaggttgcagtgagcagagattgagctacttcactccactctagactagtcaacagagtgagactccatctaaaagaagaagaagaagaagaatctcagatttataagatgagagattcagaaatatttggtttccaagatctaggcatatttggtttcagcacccaaaactttggacagcagcctcctcattctctcctggtagaactgacttgagagaaagcctggttagggctaactgattcttaacatctctctttaaccaaggtcatctcaattctaggaaggagagtgtgcccctggctcagataaaccagtgagagttgaagggtaccaaggacaaggtactcagatgacaaggctaaggggaaagctgcactgtgggcagcaggaagtaactggacccacatcagagctaacagcaaatattcacaccataactccgaattctcagatcccaggtagactctgacttcctcagaatcccactgtgatgtctgagcctcagagcaaggcttggatgccacagtgggctctcctgcttagttgtagtttgagtcactcctttgctcttttgcaccatttcagctaaatcctgtgcatggggtgtgggggtttctttagaccttgagccgaagctagaaaccagatttcaaaaaattctgtgagcagcattgagaagctataccagggagaagcaaggaccaggcttttcagtcaagcataactgagctattaagacacaagagactcaggcgtctgcctgtccgcatcaatctaaggaaaactcagcacacattgctgcagcaagcagaggtttggacatgggatgggctgttatactgtgcataatttaaccaacacatgtcggtggctgaatgctacaaaatccacttcttgctcaagtcttacatgaccagtagggggtcagcagggggctcttctccacatgtctttcaaggaccctgatggaggctgatggaggttctaccacagcatggctgcaccgtctggaatccatggccttctgggtcacctggcagggaaaggaggagatgaggagcctttggactggcaattaaatgctgcagcctagaagggacacactcatttcctttcacaatctattaatcagaaatagtcaaaagtgatggtccccaaaaaaaaggaagagctggctgtggctgagcactagaagattctgccacagtccctgctatggatgagtcctcctccccttctgagaccactcgtttcttcctgcatatttactgtacaaaaatattataacaatacaaggaataaaaatggaaaggaagccctccgcaattccatcactctaacaaatcaa

SEQ ID NO: 660 - DNA, 2520 bp, Homo Sapiens
gtgctcgagcgtgcgctggcggcggcccgggctcccgggcgtctctcacgctgtgttttggcggcgcctggggtcttcgtttgcatatgagaagagccgaaagcacagagctacaggcgaatacaagtggattttttttctttttctgtttttttattagaagtaatagttgctgcattttgaaaaatcaagaggaaaagagttaacaggaagaaaagttcgaggctggaatgcagtggtgcaaacatggctcactacagcctcaacctcctggcctcaagcgatcctcctgcctccacttcctgagtaactttggtcacagagacacggtttccctatgttgcccaggctggtcttgaactcctggtctcaagtgatcctcctgccttggcaaaatgctgggattacagagctgccggcttccccttgaaggaataggagtagacctgctgaactatcacatgagagaagaggcccaaaagcttgcacactacagtcaagctggcccttaaagagatggacctagaagatgctgagccagatgtactcaattacttctccaaaattcatcaattagggtcacacagctgctaattgttctgtgtggggaacatgtgaggggagaagaaaagacacacatacaatacctgtaagggtaaacaacctttatcccatgtaaatggcaatgcggatataataagcaaatgatataataagcaaattgatataataagcagattgatataataagcaaattgcaatgggaaggggagaaggaaaagatacatacatacatatatatacatgtatatatatgtatacacatatacactcaccagactatggaggattcaccaccagactgggaagcaacagcctgggctccagagtcggacaccacactcaccagattatggaggattcaccaccagactgagaagcaacagtctgggctccagagtcagaagtaacaacaggctgacctccagagtcggacactaactcaccatagtatggaggggattcaccaccagactgggaagcaacagcctgggctccagagttggctacccatccatgcacagatgaggagaggtctcatgaagctttggtattgtccgggaccctagctttttttgtaaaagttgtttggcatgaggcccagtcacagtggcccttcgctgtgtcataaacacttttcatgtaattatttgtggttttatgatcatatttataattacagcaaattttccactttataacacaacaacttgtacatttcactaataggcatacatattgtgtctgtttttttcactagtataactaatgctacagcaaacatctgtgtgcataaatctttgtttaaatatgattattttcttattattagaaataaaatggtgatgagaagataaaagtatttctaaggctcttgaagcaagtggtcacactgtttcctcccacaaattttgccattttattctgaacagaatacctttttcattttttactctgtattatactttttaaatctttgctaactttacagttgaatgatacctcaataatacttgcattttataaagaaattaacatttttttcttcttatagtttctaatccataggtagtttaaactattcattgatattctttttttttgcatttctatgcttcattatttatagaaaatttttaccgttttatatttctttggttttgtgttactcttgattttccatattatgtttttccatatgaatatcttttattgttatgtagttaaccaagttgtgtcttcctttatttttcttttactgttttaagcttggaattatttcccatggagagataaatattagtctacctattttttatacaagtattttgattttttgaattagcagtttaattcattgaaaatttaattttgtctaatatatgaggtgaatatctaaagtttttccacctagcttatatttggttgcaaaatcattgtttacgtttccccattggtttgtattgttgcatttcccacgtgaacacttctgaaccattgttttgtttcatttacttatttgtcttttcctctctcagaaccacactaacttgttattatgactttataccattttgtaatactcggtaacattattaattcctcatcaatctgacttttcaatagttttaaaatttaatcttaaacatcacaatcttaaaaaaaaacccataaattccattggcattttgaccaagagtatattaattgcacagattgctttgggtgaaattaaccactttgtaggctcagtcctcctatttggaaaatgttaattatctccatctatttatgttatcttctgtacttccctttcttcctatattttacacatgtcctgataatgttactccaaagtattttatgatttttttccctactgtaccacactgcatgtttactcatacaaacattataataaaatttcttacttttaaaataacttctattttaaaaata

SEQ ID NO: 661 - DNA, 2864 bp, Homo Sapiens
gtaagaccacctcatgagtagagctgtgttcttccatcagtcaggttgcttctctgtttgtgatgtttgcagccattgatgatcactgcctagatccattaattcattaaggtctgcaaaaggaccctctcttctccactctgtctcccaggtaggaacctctgaagctgaggacgtattcttgctggcttcattattgtcatcattcctcttcgtgacctattacacatttctgaagagaaactcctctcaccagctcctttgtttcctaagatggctgggatcctgatacctacatgcatgagaagccacaccagaatgccagccgacatttgcatgcagagacgttgcctgtggagctgtctccagaagaggatgcagctgcaggtacttgaggaccacactccccctcccaagcctaatgttccctacatggcagcgcactgagcattggcaatgcaaaaaccacttctcaattactcataattgagttgcaaaaagagattattctttgctgaaacttgacttctcatcctggaagcaggtttttctcatttgggatgggaggggggcaaattatattaaaatttgctggaaatttttgcttggaacaaggcacaaaaatattccttggaggttgcagatgcctcagttgtcattctttaacaaaatcagggctctctttgtaaaaacaaacacgacccaggcatgttcactctttctttggaatgtatccatggtgctaaattagattttttgaataccctcacaactggccccaaggttgtgcatggctattgctgactctacaacaggggaattaaaggctaaatgtattctgctgactccctggttctctgcttatccaaagggcactgggattcattttggaaaatcctagagattacacacaggctttcttccagggataagttaaagaatttaggaaacacccaggcttctgtcttaacacacttgaaaaaaaaaacaaaacatatcttataaggtgtcccagtgacccaaaataggtaaaacacctcccaaggaagcacttttctgtaaaatctggttctttaacccctgtgcctcttctcattctcaaaactgcacaagaagcagcatgcccaaggttctagcccaaattgacattgcattaacactgtcaaaacattaatggaaagtgtcccaggaaggactagagagatttcttctaccccattgttgctgactctgacttcctggttccatcaagattccaaaggggaggagaaacttgatgcttacctcggggaaatctctgagtataaaaccttaactgaacctaccgagatcaggaagagctcatgttcaaaagctgtcacccctctcccggacagacaggcttgcagggagccccagctctgtccacaggagccttggcctgtgacctgactctaggcttgggaccccctctccaagaggtagggagggcagacctcccaaagcacagggtttcatccagggctctttataatttctaaggctgccctctaaaacctactcctttgcttccctttatcttcccctccatcaattcccttccctcctatttccaaaaaccataaccataaccaaatttggcctgattctttaaccgataaacctaaaaattcagaaatcaggcagctctaacattcttgaattgtgcctcatgatactttagttgttgctgttgtcattttgtttgtcagaagaatactttgctatgtaggtgaatttaaaaagtgaccctggaccattatatttcattataaaatacagcggcataaggccctctccaaaagacatgctacagctcctgccttgttgatgtaaccatataaacctgtgaggagcatgagcacacatccaaatagacatatctcacatgaacacgctaaacagagacatggcgcagaagctatgtggggccttgggctgaaccagcagttagagcatgcaaaataccactacagacaaactacagacaagttctagaaagtccagttgatactacatgagcaagccagtgaaaagaaataattgcctgtagcaacacaggatacaaaatatatttttagaacagggtcttaaaagtgttaggacattaaggattctaaggaaatctggtctgtatcagtgaaaataattttgaaaaccgaggaaaatgctaaagtccaatgtaaaggaaagggtggaaggggcaagtaattgacaggtttcctggtggccgcgcacctgcggagcacttactcacctcactcacctcactcagtgcttttccaggcatgttttatttcctttgcagtcctcggcaccctccgaatgacccctgataacagcaatggccagcgtttctctgatgctctgctaattccacacgtgacctcatctgagcctcacaatgaccctgtgaggtaaggattattgtctcccattttacagagaaggaaactgagacccaagtggtactcaagtgtcccctggatacctaccagtaagtgataccttactggtaggtatcctaagctcactaccagtaagggacacagcagaagctccaccccacttggtgactctcagtgacaagccctccctacctggccataccacctcatgtggtgtaaagctctgttgccagtatggaaaacactcacacgagtaaaaccaaatatccacttgcattgtccaaaatgacatccagagtcgagaggccaggaaatattcctagacacacataggttgtccattcttcattcagcagtttagagacaaaggcataattaggcccatctgtaaataaagtgagtccctgacacaggacacaaataaagggcttcactgtc

SEQ ID NO: 662 - DNA, 2240 bp, Homo Sapiens
attcagaccttgacagttgtaaccgatagactgggctggggcaacgctgatgaaaggcaaattcctgagagaaaaatcacccagattagcattttggtgtggatacagaagacgagattaacacagatcaagtaacatggaaataaaaaaggagacaatgctggatgatacaggggcagccaacaagaggagaaaacccaagcattggcaaatgcctcattatccaaagaacactgggcctcagagtatgtcagctggggtcagacgggaacaggagtctggctcaacacacatttattgcactcctgtttcatgccaagaaatgtaccaaaatctgggactgtgtaacacagcaaaggaaaagactcatctccaggaagcccccttgtctaggaagagaaattgaatatcagcataaggtggtgaaaagctgtgaaggagatgagtgccaggagtccatggaggaaggattctagcctggacaggtgaggaatggctttctggaagaagcagatgccccagctgaactttaaaatgcccatgtgaaatgaactgtctgtatcttcaatcagcaaatggagtaggtggccactgtttaattctggaatggggaagtgtaaaggtgtggtgtgtgtgtttacccctacttagggattcaaaacagacagtaaagaacaaaagtctagccctttgagcattctccatgggacatttgaggtctagctggccccagagaaagagagacagaagcaaggtcatatccatttgagaaaatcaaagtgtctgctccaattgagtctggtgtccttattcctggaatagccatccctactgctctggtgctgatttacctccggcagttcagtgcttcctggaaggtaggctgggctttttaacaaagtgactccttacttgacatgttttacccaaacacagaggccactgcactatgtgcaagaaacaacaaaaaattaaatgagactcaatgccttccttagggatctaaaaccccagtaacacagataaacaggtaaacaaataatgtgatggtgtgattctatagcaacaggaatagagcactgcagggccaccgaaggaaaaggtgatgacctggcttggattcagtgataaaaaggggcttacctcctttctctgtttctgctaaaagccagtgattaccccctgcttttcccatgttgggcatagctgtaagtactttagacatagcggcacatttaatcatcatgcaacaataagaggaagctgaggcagacagaagtgcccaaagtcacatacttgaagccaggacttgaacctgggctatctggctcctgaatccatggctttcactaataatgacttaccctccaatgaggaacaagctccattctggcctttctttagcgaaggcaactgcctgagctcatggtctgatctggcttctgggaaagagaaagcaggggaaacgtctagagatggcatactgggagaagaaatttcttgctgtggaatcctgcccccatctccctccccaccatacacaatcccacgtgcatttacacctacacgccgtgtacacacgaacattttttctgctactcccatgggccccaactctgccttttcatcaaaatcacccagagttttaaataaaatgcagatgttgaggcttgttcctaaattataatcttgggcatctaaattttttgattaaaaaaaattgacatgcatgcttaaagtaaaaatttagacaatacagcaaagaatgtgtttgtacccctcccacctagcccttagttcttccgaaaggcaaatacttaaccgttccttgttatccttccagaaaacaatatatgcatatattcatcttttttttcttcttcctctgtaggtgattgtggtgaatagtcatgagaatctgggaactggctcctgctctgtctatcttggagatgcatcttttgtgagaagccagggcaagaatagggaggcttaggcaatgggaagtttctgagtagataaagcagatggcagagcaaagggacagagcctggcgagaggctactccctgtagcaacctgcctaagagtgagaggaaagcaaggcatggctatgagcacgtgtagtctcagctacttgggaagctgaggctgggggatcacttgagcccaggagttcaagaccagcctaggcaacatagtgagaccatgtctctttaaaaaaaaaaaaaaaaagaaaaa

SEQ ID NO: 663 - DNA, 14676 bp, Homo Sapiens
acacaagctatcgctgactgccggtgcatgttggaaatgggccacagggctgggcatgatatgagctgcctggacattggagggggcttccccggaatggagggctccgggcccaagtttgaggaggtgagctggtacgggcgctgggggtgttcagggaggtccgcatgtgtgcccaggcatgggtgtgtgtggggagtctgtgttcatgcatgtacctctgtgtgtttaggtctctctggtgtatctctgtgctctgtgtgcacaggtgggtatgtgtgtatgtgcatgtcttggctttgatatcccccaaaagcagactctgagacaaacacttggatacaagtagtttttttggagatgatccgtggaagcgccaatgaggaagtcaggaaagagagatagaagggagaaaagtcaaaagaaaattcatctatgagctggttaccactgtgggccgctgcaccagtccccctggggacaatgtagaacctcagaatcatcccactagaggacatggggctggtcctttattcaccaactcctgtccttctttggttgaaggctgtggtctgggggtgttaatttcctcacattccagctagtttccgagggtgctggagaaagcccacagaatgagaagcaaagggaggcaggcgctggaggctggaaatcattttgcacgggcagatgagctcaggtaggctgaggggaggtggcacagggtgtccactgcagctgcagcaaggtgtctgggggctgtgcctctctgtgtgtctgtgtgtctgtatgtgtatatgttttcctgtagaatgtagaattcttgttagcatcaccaatacagttacagttacagttgggagtttacattccctgggtccacaagacactcgccttcttacggtgcatcagattaaattgctgcacctttggacttctcagggagcctggtggccagcaaccccacacaagtgacctcctgtctctcaacttctgtttcctctttggtaaacagggataattctaatgcctacctgcagggtgcctcggggatgaaaggactgatgcaggtaaggcgttggcacaggcgctggcacatcaacacgtgctggatgagttaacctcttcctgctgtccctccaccccattccagttggcgagagtgatcagtgctgccctggcccaggacctccctgaggagcgtggtgtcaaggtcatcgcagagcctggctgcttctatgtggagtctgtctgcatggccgctgtcaacatcattgccaagagggctgtgctggagcccggtgggtgggccaggatggcactgggtggggatgccactgtccaggtgtccccaggccctggaggagaggaagggcagagggttgggctctgtcccaggagctgggggtcagagtagtgactgagcactccccaggaggcagccggaagctggtgtattatctcaaagatggccactatggctccttccgcctctgctaccgagagcctgtcccaagggttcccatcgtggtgaaggtaagggggccactccagccccgagtctagtcccttaccttgaggtgccttgtgcctcccctactgggaacagtggctgtgctggaccccagaggcaggtcctggcctgctgcttagaacacatgtggacacgtacatgatgtgtgctcacagatcagagcgtgtgcagcagctggatatgtaggcctcctcaggcaaaggggcgatcaccagaacacaaaggcgtgggttgttttccaaaatattgaagttcttctccctggtggcttaagagccattccttcttcctggtggttaaagagctattcccccgagtccaccaggggcctccctgccgacactcttgctgctcagtccctcccacgatctggcaacaaagcttcaatacctgaccctgtagggccaacaggatcttcctccagctctgcagcagttgtctcctaatgtgatgggttggtgtccgggccacactgctttgtaaatatcttgactgtttctcccggccagtgaacgtcttggtgtgtgcacacatttggtcatgtatgtgacgtgtgtttgcatgcatgtgcgagtgtgtacgtgtgtgaagtgtttctgggtgtgtgtcttcgtgtgtgtatttgcctctcttctcatcggaaggagtgagttctggatgtggaggaaccagtaggagaccctgtgtttgtttggttcccacaatagttttcaattttagttgcccatattaaaaaatctagacatatttcataaaagcctggattttctcagctcctctcaaacatttgagagatctgatgatacgtggcctgcagaacaacaaggcaacaaataattcaacaaattagtctagcatgtcaggcactgtgatctgctggaacgggacttcctcagtggctttcccctttggacagacattgactttccagtttgttgtaagacttacctggcccatttcactcatttgtgttacctgcttgacctctaggtaattgagttttcaactgctgccttatagcaattattgaagacaacagccccacttacagaggaggaatctgagcccttacttgtaggcacatcagacctggccaggctgggcaggggccatggagggatgggtcccagccagtatacacccgtgtgcccctgggagtgtccttccgggtctttcagtgccttccagataagggggtgggataggccagcctgctgtcttttctgaccccctttcctatgtcacacaggagttctgctcagagccgcccctcttcccctgcaccctctatgtcccatgtgcgatgcctttgacaggctcttcttggaggatgtgcggctgcccgagctggatgtaggcgattggctggtcttcccctccatgggtgcctacatgtcctccatgagctccagcttcaatggcttcctgcctgccaccatctgctacaccatgggcccccagctcaggtgcctaggggttggggttgaagaggaagcaggaaacctcacactcatttgagcttggggtgggaactggccccagggaatctcccttcccctgttgactcactgaagtcaaagtgtccatctgacctttggactctcatctgcctctggcccccctcccagggaggtggagaattgcaaagagatccccaggccctctagccactggctggccctactcctgcttcagacgcccactgtcccagctctgcctccaggccccagctctgctgctgtgtgtgcagcctcagggctgtaggcaaaggccttgacacccaccctgtaccccatgtcctttccccatgagccttctggaggcagagccttaacccagagccagctaggctggagggctttaagacactctggtaggtaggcccctgggaactgttgggagttgggatggcagggaggaggcagaggtttgggtaactatgaaatcctatgcagaccttccaaaaatatcttgctgtcattttgggtcagttctttccttttctcttttcatttcttttcttttcttttttcttttctttctttcattttcctttcctttccattcctttccttttttctttctcttctttctttcctccctcccttcctccattccctttctctttctttcctctctttttgagacagagtcttactctgtcgcccaggctggagtgctgtggcatgatctcgggtcactacagcctcgacccctcagggctcaggtgatcctcccacctcagcctcctgaatagctgggactataggtgtgtaccaccacacccggctaatttttatatttttggtagagatggagttttgccatgttgcccaggctggtctcgaacttctgggctcaagcaatccgcctgcctcaacctcccaaagtgccggcattacaggtgtgagccaccgcatgcctgtgtcttcggtcaggtcttacactgacttttctcagcagtggcctgccctgcccaccctccttgtcatttgcctctgcatccctcctttcccactctcttgagcagtggttgaaggggacgcattagaagctacttcttctcagagcgactacaaaaaatgggctattgatcttttacgttaaataatgcagcccacacacctgctcagttcatacctagctggtgtcagtttacatccttaaattcatcctgccgctcctccccgctttttatttattcatgcccttgccttgtcccagaaagcgtttctataaaattcatcaacatatcatagtggttaagagcatgtcactggaataaggaagaactgggctcaaatttaggcaccactgctactagctttgaatttgggcaggttaactaacatagttgaactctagttttccttgtaaaatagtggtaataataataactttaacttccccgtagggttgttgggattaagagagggatgaatatatcgtttagggccagcttttccttcggccaccctgttcttgctggctctcctcctggagtctagatgtcacagagaccccaccgtgcatcctgggtcttttcagagagtgttggtagggtgtcccactcaggccaagccaggatgtgtgcccgatgctagggggacaggggaggcaggcacagacccagtctttgagttgtcctcaggcctgtggaaagctaaaggcaggcgcagctggctgcagcacagggaggaacatgggacatactttgaggacagttcaggtggaagccatccatttggaggagtgggtggcttcttggagggagaatggtgggacctggaggcagagcagaatcagtaggtaaaagtgggtaggaagcgtggctcaggtgtgggaacaacttggctcaggcatgggaatgagcctctgctcagagaacagtgagtggccaggattggagatgagaaacagagattgcagagcctggggacacaaggtgaccagtttgcctggatttgtctggaacattcctggtgctagcactgtaaatcctgagtcctaggaagctcctgagtctcaggcaaaccagatggttggggagggagaggagggaggggaggagctcgtcacaccccaaggccacattcctgcagctatagcaggtacagccattgatttctcagcttccagctcagccaaggaaggtgtctcccctcccttcagcagggcctctcccaccctctctgctaccactcaactcagccaggtcctcggggatcccagagtccctggagctgaagaggaacttcccctgacatgtgggaagcaaagagcagattggggtaacagaggccactcagagaagctagaggagctcaacagcccatccagtcaggtgcatctcatgagggcatcccagaacatcaaatttcccgcctgcaaaatggtcttgcttatgcccaaacactcagaatataagaagcacggattatgggtacgatacttaggggtgtgagcaggctttgggaaatgtgaactctttccagatggaagacattccagtgagttttctttgcccctggggggtgggagagggtgagtgggtctgagtatgtaagtcacaggtctccaggtctaaccaaccagtggcggggtgagtagtttggtgggaaggacagttaggaacaggtaactaaaggtgagttaggtcagagcaggtgaccaggggtgattcaggtcaaagcaggtgactgggatgagtcaggatgcagagcaggtaaccaggggaacagatgtgaactgctgattaaaactggggggaaatgttgtttactgaaactacggggaagttaaactttaaaatggaggacaaagaactgaacatattgacatattgattctttgaagagaaattttgaactcattgtatccaacaggaggatcacgtgagcccagcagtttaaggccagcctaggcaacatagaaagactctgtcttatttttaaaaataaaataaaataaaaatgacagaaatgtattctctcatagttttggaggttagaagtctgaagccaagggttggcaaggtcactctccctctgaaggctccagggaagaatatttctttgcctcttgcatcttccagtagccccaggccttttctggcttccggcagcataactctagtctctgcctcacaacgtttttctctttgtctctgcgacctcttgtcttcttataaggacaccagtcatccagtggacacaaattttgtgggggcatgatttaacttcaacctccaaccccctgccgcaggtcaccctttggcccttatggcctccaagtcttgcggctggagctcacttctcagcctggggtcatctgtgtctactttccatagcaccaggattcacctctgctggtggttcccaggttctctctccagctgtgacctctctcccacactccagacctgaaaatctcacagcctcttgatcaccgacccaaggatgtaccacagttcactcagattcaacacaagccaaagggagcccgctatgggcccccatctagcggaagggctgcttcccttagccagagtgtacctcactcctcagctagaaatctgggctttgtcctccattttgaacttctccatcacctccctcatcaatgggccaccaagtcattcacactggaggtggtagagaaagccaactgtgtgccaacagcttttttttttttttttgaaatccttcctgttctacccccagaatgtctcatgcacacagcccctcccttcttccctctctcccaggtcactgtcaggttccagcccctcactagttctctccagagccagcataacagcctggtggcctccctgctgtggtctcattttctctaatccattgaccacatgaccccacaagctccttcttttttcttttttttggagacagtctcgctctatcccctaggctggagtgcaatggcatgatcttggctcactgcaacctctgcctcctgggttcaagtgattctcatgcctcagcctcctgagtagcaaggactataggcatgcgctaccatgcctggctaatttttgtatttttagtagagacggggtttcaccatgttagccaggctagtctcgaactcctgacctcaggtgatccacctgccttggcctcccaaagtgctgggattacaggcatttgccaccacacttggccaccacagagtcccttccaatgtgctctcctgagcctgatgcccactgtgtaatcccatttgcggcagcccatatatgcaggataaagtccaagctccctagtgttatgggatctttggggtgtcaattttttggctggaaacatctgtggccacagcacctttgcccaagttcttgtcctgtgtccaggaagaatgaggtatgcagacaagcaaagagcgaacaagatgaagaagagttttatttagtgttacaacagctcagagactggcagtgtgtagctcctctctgcaggcaggtcatctgtccagtgttcagttctcagcagagaggaggcctcggagagggtggctcctccctgccagcaggttgtctctgtagctctcagtggagaaggtagctcctctctgctgctagtcatcccatcatctccagctatcagcagagagtactcctctctgcagctggttgtgccattgtctctctgctctcctcatcctctggccatcctctgatctgctctggctgagcctagggcttttatggaccttttatcagggaggaagtccatgccaattggtccacgggcagccatgggtgggctggaagaggcaccatgagtccccactccagtccatgggactggcagcctggcccgcagccttcaggccttccctgacctgaaagtggggtcttactggggacctgcccccttctgcccaggactctgtctgcctcccgctgccattcaaggccccagggcttggccccaaccccgctctgagatgggagcaggtgccaggagcagatagaggccaggcagcgggagcagacacccctgagcctgcaggccaccactgggcccttcgtcccaccagcagagggagagctgaccttcttctcttacattctcagcacctgtgaggtggaaggggatgcttttatgatcacttcctgaaagagaggctcacagaactgaactgatgtgcttgtcatcacacagtggaggactgtctaacaccaagtctctcattcccttggtggccagcccctctcagacctcagcaagtccctctgggccttcatgggagagcagtgtccaaggaatgcggtgtcacgcttgcggctctgccaagggcttcttcttcgggctctgcctctagctgcttctgacagaggcggattcatcatgaagcaaacgcggctgaaccccccagtggtcttcattcttctccaacccctttcaagacccagggatgggctcagcaattctgttttaataattttgcattctgtcccttaaatcataaagagagcccccaatctgtaaagcttctgatcccacacaacctctcagggctccagggtcctgaggaggatggccaggtcactgtgggcctgtggtggagccagcgggcacccagggcttcctggtgggccaggtccctggtcatagactgagccagccagcatcagcctccgatctccaggcccctgcggtgagggccccaatgcccctgataaggctctgctcctaaagggctgttggccttgaacaagctgctctcctgcctcagtttccacttcaggatggagacatgaatgagagaagtgtccctgaaactcctgatggctttccatttcctggtttcctgtctttcctgaggctgaattcttcgcctgctttctctgagatccctcactttcctgccaagaaatttcctctttagtctgttcagagtgaagtgcaaatcaaaataaaaaagtgcaagttcaaagtgcaatcaaaacaaacaaacaaactttggctaaggcaaaaccaaaccaaaacaaaacaacccaactatctcttttagtagagttttgacgctgcagcatgtgttgaatagagcccatgtgagttaggctgcccagggcctgagtgacattgcgtactgtggggagtgtgtgcttttgttcaagcggtggctctcaggaagccaggaggagatttggacaaaagttggaaaggttggaagaatatgtaagcttggactgacatggctgattgggtttgggccagtttgagctggttttatctggttggatccaatacagtacggactcgggaggccaaggaaggtcttggcaagtttggaccagtttttgccatttgagctgacttgggctggcttgagctggttgctcatcacagtggcaaaaaagaagaacccttgggcaggggtgttcagggtcaggagtggaggaagggaagctatgctcattgttcgtggcacttggtagagctgtgcatctttacaaaagcaatttacagtacaggcacccctcattttcttgcacttgctttgttgcacctgcagatatttgttgtgtttttgttttgttttgttttgttttacaaattgaatattttggcaaaagtttgtggcaaccccttgttgagcaagtgtactgacacctttttccctaaagcatgtgctcactttgtgtctctgtgtcatgttttggtaatttttacaatatttcaaactcactcttttctttctttttttctgtctctctttctttcttttccttccttccttcctcctttctcctttcctttcctttcctttcctttcctttcctttcctttccctttcgggtctagctttgttacccaggctgcagtatggtgatgcaatcttggctcaccccaacctctgcccaggttcaactgattctcgtgtctttgcctcccaagtagctgggacaacaggtgcaaggcaccacgcccaggtaattttttttttttttttgtatttttattagagatggggtttcgccatgttggccaggctggtctcgaactcctgacctcaagcgatctgcccatttcagtctcccaaagtgctgggattacaggtgtgcgccaccacacccagcccaaactttttcatttctactgtatctgttatggtgatctgtgatcactcatgtttgatgtttctattgtaattgttttggggtgccacaaattgcacccatataagacagagaacttaagaaatattgcatgtgttctaactactacatcaatcagtggttcctctactcctctctccttctcctcaggcctctcaattccctgagacccaacaatattaaaattaggccaatgaataaccctaaaatggtctctacatgtttaagtgaaaatgtcacacatcccttgctctaaatcaaaagctagaaatattaaacttagtgaggtaagtgtattgaaagccaaaataggccgaaaggtaggcctcttatacctaacagcgtagttgtgactgcaaaggaaaagttatcctcagcctttcatgtgtattggcttattcagtcctcataacaaccctaccaagtagcatgtgttagcctcaccatttggcagaggaaaatggaagcacagaaaggtcaagtacttgcccagatcagcagcagaacaggctcaaaggttggcagtctggttgcagagtccatgaacttcactaccacactccacagcagttgtgagaccatgggcaagccatctaaacttttgaactttaatatcttcatccataaaatggggacgataataccctgccccattgcccagtgagtgtgtacacccttaactcggtgcataggcttgggttggcttgatccggtctcattcatttctccccacctgaccctacacttgagtcagagtatctcatgttggctgagcttgaagtatgcaggagcacaccccagaaaggccagggcacaagccctgcttggggtggagcagggagggcctgctctgccccactggggtgttcttaggtggaagtgggtgtgggatggtccctctgggagaactctctccctccagcctccctgcagagtcacccagggaactgaatcacagcacaagtgaaatgggaaaagttcccttatccccctcgcagggcctgcaatgggggtgtggctcgcttctttggtaccctgctgctcaaacctctagggggagcatgcagatgggcaggttgtggggcttcaaccccacggcagtgtctaggggtgaatgcttacagttcctgaagccccaatgggtgtgtgttacagagcgctcttttagttttgctatctgtaggcagcttgtgttaatcagctcgattagatcctctgccttatcacaaggacagagggctttctgtatcccagggtttttgccttggtgtactggaggaatcagatcacacgtgggcttagggaccgagtgcaagtttttattgagtggaagtagctctcagcagatgggggagccagaagggagatggagtgggaaggtgaactatcaagataaaatcagtctactactccataacagaggtaaggaagagtatgcatggaatacaggacatcctttagagcatctcttagtattaccatgccctttgattaaggtcaatgggaaactacaatagcgcaatccaggcaggactacaaatagcccagacccctcaggaatgaaggtttgggtcactccaccaggaaaaaaaccacaacctgctgaggtgcttgctgaaggcaaagggaatacagaatgggtagtagaagaaggtaatcatcaataccacctatgaccatgtgaccagctgcagaaatgcggactgtaactatcatgagtatttcctccttctttggctaaaaacatgtttgtgcatgtatacacttgtacgaagaaaatatatccattttatttccttttcctttatcatgtgacataagatttactgacttcatatcaacatttaagtattattaactttatgtaataatatttgggttggggattggtgggtttccagttgtaccaaggatagttgtattattttaggcataattatgaccttattattgtctttatttgaagattatgtatgatctcaggagatgtgtatgggttcagcttgacaaggggtggacttaccatggttaatactgagtgtcaacttgattggattaaagatgcaaagtattgatcctgggtgtgtctgtgagggtgttgccaaagaagattaacatttgggtcagcgggctggagaaggcagacccacccttaatctggtgggcaccatctaatcagctgccagcgaatatacagcaggaagaaaaaggtgaaaaggcaagactggcctagcctcccagcctacatctttctcccatgctggatgcttcctgcccttgaacatcagactccaagttcttcagttttgagacttggactggctctccttgctcctcaagcttgcagacagcctattgtgggaccttgtgatcatgttttagcacctcttacgaatgagtgtctgagcagccaaaaaataaataatgaatcatccaggcaaaggggaagaaaaatggacttggccagagatggggaagaacgtacgcaaaaagatgaggtcgttcagattggaagttggattggagggcggaccaaaggagaagctgctgaagtagatgttaaagatggagagaagtggacggcagagacatagaggaggaaaagtcagcaagacccgagatgtgtatggagagttagagtgtgggaagtgtgacatgtaactgaatcggatgatggcaactttcactgggcagtgaaagttgagaacaacaagcaataacaaccatacgaagaatctagcaaactcagactttacttctccttttcgtggtcctggaaacagctcagaataaagtggatctggacctctacagaagagagggagctccagattccagtccattacacacatgaagtatgcttgcggcccacaccactgcgcaattcttcaagactatgttgtatattcttcacttacatagaagacatctcagtttccaggaccagttcaggatgtaaaagtgtgagtcacttaccagtggcacaggtcagagtatctccttcaaatcctggtaacccaagaagaaaaggggtcctcatccaggcaagctgattttcctagcatggtcccaattgatagtgatactgtgaagagacacattttgtgctgttttgctggcagtgatactatacctacaaaaagaagctcggtagttgttgtggttgtccgctggtatagcagcttttgtgcagggggaatgatgggatgagctgtcaagaacatctggtgtataaggatccggtgttttccatgggtgatgcaaatggccttgggaactggtgatttagctgttggactatctgaaaaggtaggcttcacctgtgaagactttacaggtgcttgttgggattagttttaggaggccggtgtcctggtggtcaagctgctagatgttaggactcctgctgggatctcagaagttgttatcctatgaccaattttatataaaccttggaggatcgctccttctttcttacctcacactcagctgcctcacccagctagccctcagctcagcagccctaccccgaccattgcaaggccactctgccccactcccctgcctgatttcacggtattttacaaaagtattagctgagacagatggaaattatttcatttttttaagaagtcattatagaaaaggaaagtgaagcactgacgggttaaatcacttgcccaagttcaggaagacagtaatgctgtcgttcacctaacctctgatttaacaaatgtttatgaagagacttgtatgccagacaccaagctccatgcaggaactactgtgtaaaaagaaaaaattatatggatgtataatcaatggatttttttttcttttttttgagacagggtctccttctgtcacccaggctggagtgcagtggcacaatcacagctcactgcagccttgacctcctgggctcaagagatcctcccacctcagcctctctagtagctgggactacaggcatgtgacaccactcctagctaatcttttttatttttcatggagatggcgtttcaccttgttgcccaggctggtctcgaactcctgggctcaagcaatctgcccacctcagccttccagagtgctggaattacaggaatgagccaccatgcccagcctacagtcaatgaaatattattcattataaaaaagaaggaagccctgtcatttgcgacaacatagaaccttgaggccattatgctaagtgaaatatgtcagacagagaaagacaagtactatataatctcacttctatgtgagaaacatacagtgattctcacattatctgtggaatctacattctataccttaaatttatataattctatttgtcatgtatacctcaataaagttgggaaaattatgtacaattaaatgacttttagtatcttcacagagttgtgcaatcatcaccacactctaatgtttgatgtttttgtcaccctaggaaagaaatcttatacccattttctctcctcatttcttt

SEQ ID NO: 664 - DNA, 7022 bp, Homo Sapiens
tctcaagggcaattgagatgtcagtgaggctgtgattaaatgtattggatattagaggattttaaatacaaacaagtattataggtgttaccactgaccccgaaggtaagatttactgtgaaaatttataatgcaaggaagaatgatcaagttggctgtcagaacaacaaaatattacaaaccaggatgtctaagagcagaagtccgtggttgccacctctcaagcctcttagcttaatccaatctaggatgcatttccactctgcaacaaacagtatttatttttgccttatttgcagataacagttttaatgcaggtactgcccatggattagctttgagcagtgtctttttgctttggtttttttatttgtttggtttgttttgagactgagtctcagtcctccagcctgggcaacatagcaagactcccaccccttaagaaaaaagaagagagaaaaaaatagaagttgtggagagggaggaggatgcttgaatactttgaccgtacttggcataatagacattttgagggtttttttgttttcttaaaattcctctggatcagttttcattgtttctagtaattatatttatcgttaatgaattcatattctgctctagcccctaaagatagtttgatatgctaacttttgttttgcctttctagctgctaagatagataatggttattgcaaaatgcacgtttttaaatggtctccagtgtggattgcttctgagctgctgatggattgaatacattgagaaggaatgtgtcatttggaatccaggaccagtcagcaaggataactgcctgattttatggtcagaatgctctaactcttatggcatactgatgactttttcttccattttccaaaaaagcaagttttgtcagtctcagtgtttctctgatctagctactcacaattccattcccaaagtagtgacctagttctgtcacttgggtttcaaagggagttgaagtgtcactgagtgagtacagcaaacctgtttaatgatttataggaagcaaataaaaagaattttgtttgctaacctagaagtatatcagattttggtttcaatttataattttgcaaaatataaagacatttcctggctaactccatccagatgaattattcagtattttttctcctatcttaatgaagttaatttgaatgctaatttcctataaccaagaaaacagttgaattaaataacccttatcttttaaacttaaagcttatactactaataatcatttaacattcacttccttttttctgacttaattggtaggtaaataaaatacttcaaatttgattggcaaattggaaaatcacttagaacaatctgctagtattttttattccctttgttttttcctttacacatttgtactgcaaaataaatcaaggacaaagactcacactgaattgatcaacttgtgtttggtcttcatgggaattacatcttttttcccctcaacatttattaaaggaacatacagaatttcagactatagcaaactaatacctttagcttgactaagagttgattttcgttaaggaacagaacttgtaatttatttcgacatactttaatgtatgactcatccctgttaaagttgtgagactcaaaactacgcccaaatcacttaattttatgtccttccctgtttactgtgtctgaccttcaagatttcgtgactgatgctgaaatggaagccaaccactgcagaaatttgggggaaaatgagatctgaagaatacaaggggaagtaggaattcatttctagcatttccaaacctgcttaatcgtgtctgctccaccacagtcagaggaaaagactgagttcatggaaattaccagctaagccttacatctgtctttaatgtttttaggaagtatactgaaaaggtaagtgagatgtctgttttgaagaaagactcttactgggtaccttaaaacccgttgtttcctattagtaaagatgggcagcttctttattcctagcttcaaaaagccttgcccctgtttggtgtgtttctcagtattgtggagaaggtagtttctgagcaaggtggtgcttttcctctgcttctcagcagctaagacagaaattgcaccgaagtgtacaaagggccaatttttgttgtcctgttgtgctcaaatccttttttttaaaaaagttatttcaatcaagtcttagttttattcctcactatataggaaaaaaatctttaatgcctcaaaagttccattcagcattacatttgcattactcttatttgcagcaaatatgagtaaaattataggtttttaaaggtctctaataacatccacttatattggttttgtagataatccataaattaccagaaataaattattccacatttattacacacccatgtaatagatgtcgtgccaggccctggaatatactaatggcatcacctcatgtggtaaaaagacacattccgccatcctggagtatacaaaggtagactagcatatagttcatgtgctcaaggagttcatttttattgacatgatacagatagaattgtagtttagggaatcaaaatctaataaaatgaggctaattccattttcccattaacactaataactagtgtgtaaatctgaatatgacacattctatatgaaagaagctctgtgtgcatctacactaaatactcgtgtgtgccaggtactgttttaaactacgtatatttttttaattctcataactgttctctgaggtatgtactaatactaaagcttattgttaaaggaaggcagaaaaattaagtaacttggcctaagtttgcataactgtgatctgggatcaatatttgaacccatacaggctgattgcagagcctgcactcttaatttgagtgtgatatttatgtgcagtacctggctataagtacccacaaaacgtttcaaattctttataaaatttgcttagttaaaaaagtaccaattgcataatatggttataagtctggtagaagttaggctttttacaagacatgctgcttactgcaccaaggaggcaagaaggctttttagagagcccagaatttcctttcctcaactcctgcttccaagacagtcattttgcatgataaccgtttccccaaaaaacacagacacaaaatttaaagaactggaacagaggaagcagagcttatcatagtatatatgtttagtaccctgtcacttaggtccacccctctttctttgtggattgtggacattttgtttaactgctaaatcatgagaatatatgactgctgagacttttccaaggattttttaaaaaacacattaggctttgtgcagaagtaaagaaaaagtgctgtgagaaccccaggtaggtaatttactttctattgtactcatagtttgtttgaaacctcttcacctctatcccttattgttttatactctgtaaatctgattttacctttaataaacttttctgaagtgaggaaagagtatgttattctctgagactgaaaaaaaggaaggaagccaggtcttggatggcctactataccatgataacataccagtttaagggcacagaagcaagtgaagtgtcttcagcaaaagaattacatacttagattaaaaattttttttcttttactgaagcgtaaatagtaggattttaagtgggaaggtcgcataggtgactatattctcttccaaaaatgacataggtaggcttagacaggaatagtggtgttacagatgaaaataaaggaacatatgtaaggctctttggaaggtagaataagacttgatgatttattgatttgggggtactatggagaaagaaatctattatttttcccagattttgggttgtgcaactaggtaactagttggtacaatcttggagaatcacaggacaaaatagcataggtacggtttctcttaattgagctgttataatttacaaagcagtagaaacaaatacatgaaaaaagtatgtgtaacttcaatagagtttttattttgaatgcagaaatcttcaatgaaattgaatatgcctcaccatttctagctttattcttatcccaaaatatcaaccacagatgcataagctccagggaatcttttgcctgactagaaaaccttatttaagaaaccagtacctctaaacacatatccttgggcgattagtctcctgtgaaacaactgttatttctacacatctatttagaataaacttggatggttgacttttggaatgttctcatttttagaataatagagatgtaggaaaaagtgaaaatgctctgtctgtatctatttaaagtcttgacagcattaaagaaatttattctcttcctgcaatcactcaaatctgagcacaaaactgaaatagcatcgtaaactgacaaagctcaaggtaaagtcaaatctcagttcagggctttgcacacgtattacatagttgtttttgtttcttattctaatttaaacagaaattaaaatggaaattttaaaaatatactttattaatttataatttacctaagttcacattttatttattccatctatatgcttactatgagataaatttattatgttttgaagctgaaagtaattacaattagcatgtctcagaaaatgtcattcaggaaatagtatttgaatatcaagtttactcctgcaaatcagcttggttttgtattcttatctctcttctcaatggaagtatatgaaattaatctcttctctgtggtggcaagttaaagatacctctgacttaatcaatttctacatggcacctttgctaaactatctcccaaaatagtagttcttatcacaataatgctggtagccatgtgactttcagtgttcttggtgagactgaatcatcttgcactctggatatgcaccatttattatgacatcctgctagaacctgcaatccattttcccagtctttccatggagacgttcatgtctttgtttcttaatgtgtagatcctagacaggggtgatagcaaaaggaacaatgaacaaatattaatcatgtgttgttttaggcaaaggctacacatacagaaatatacatggcataaaaaacaaaatccctactgtgatgtgatctaacatgacacaaatgctttagataagtctcctgaagaaggattctagacggttaccgaaatgaaaatataggatattattaataagaaacaggtagctatggatataagcccactgttagcagtgactacaacctctagtttgtaagtgtctacacaagcaagtttcatgacataaggaaaatcacagtgaaaactacctactctattagggccacaaaaaggcaagtttatggcaaaaacaaactgagatacagcatggattatcctgactatccaggatgcctccaacaaaggaaacacacattttggggttcattgtggtcaggtaatggggaggcttacagattggcagtgtacctgctctatgccatggttatgagcagcaccatctcaatttttacgcatgacacaaatgaaaaatatctgtatgatgcatcttggaaaagaaatgatgctgcagttagtgaaaaagtcagaactgtaggagaagacccagatcaagaagataaatgttggccagtaggcagtacctggggaatttaaatgagagtcaataattactgtgaacacaatgaagagattttccaggataattcccatgtagaacacagagaagaaccaaaaaagaaaaagatgcatctcccaagagcttgaaagtccaatcaatacaaatttagataccgcagaattatttactctatccattggccattgactcagtcagtagagaagaagctttagtattctgaaggaagaaagtgaggaagaattgagaaatacaaatgctacacgttgaagtgttgtttgaccataaatgattttgtgggaaatatgtggcaagtgctgaaatatgaagacagaaaacacacaaagagagaaaatgaaagaaagataaatgaattggggaaatgcggtgataataagttatttattaatttattaataaatcatgtgatgataagttattattaataacaattagatcataagttatttattaattattaataacaattagacaagaacagcaaagaaaaaaatcatgtgggaatatggcaggtggagtgaaggattagaggggcaaagaatataatttccctaacggagtgcttctttaccatgcgcatcgtgcagtaattacggctgcttcagtcttactcacccatgttcaacacaacgtcgtccacgtaagaaacagtcaccgtatttgaaatgttaatcgccttaactgtatttatctgcatgtacccttaggggaggtactctctgatcaatcttctttttttttttttgaggcggagtctcgctgggtcgcccaggctggagtgcggtggcgccatctcggctcactgcaggctccgcctcccggttcccgccatgctcccgcctcggcctccccagcagctgggaccgcaggcgcccgccaccgcgcccggctaactttttgtatttttagtggagacggggtttccccgtgttagccaggatggtctcgatctcctgacctcgtgatccgcccgcctcggcctcccaaagtgctgggatgacaggcgcgagcccccgcgcccggcctctgatccatctcttacttcacacagtctcaggcattaatcacacactaagagtgactggccaatgagggaaagagcaattaatcccagaggtacagtagcataaaatacaaagacttactcttccgctggttttccaatacgtgtgattccagccaatcacttgttgacttgttggaggattaagactcactttaaataaagtgaaactcaacccccacaaaaaagagtatctgaaactcagagagagggcttttccatgctttgttaggaatcagagttggtgcttttgagagtt

SEQ ID NO: 665 - DNA, 4985 bp, Homo Sapiens
accagaagcagaggctggcaccatgtttgttatgcagcctgcagaaccgctggggacagctctctgaaaataggaataaatagtggctcctcgataaacaccttcttgcctacagcatgtgtgactgcaaacacattcccacttcaactaatccaagacgagaaggatgacaaaataagagaaatcatgggaaaaactgcccatttctgttttgtccactttgctttgggaagtgagagctatagtcattatcaccacatcccctggcatccaattccgacaatgatctctgaccttgccactaagagtaaaaaaatgtgctgaacacctttactgggatactagtcactgattaataattcaattccagctttcctggaagccagaagtcaaaatatacttgggatttctataaatattttttaattatgaccatcgaactccaagtacttcagatttggaactcggactgctttccttgctcctcagcctgcagatggcctattgtgggaccttgtgattatgtagtgagacgagcatgagtggagcaggagacggctgtcccccacccacaaggaatatcagatgatggttcagcgatcatcacattgcctctctgaaagtgataaattggcagctggcaccagggagaggctatttcctgatggcccacacctgttgcactaagatgttaatcgaatgcagattccagggagaaacaacttcctgggcatgtgcgtaagagacaaaatggcagtaaaaattagagaatgagatcagaatatggatacattgcaagaggtggagccctggaacaaaagtaagagattatgcagtgtcactccccagacatctataaagatttctactgaacaagtcagccatcgaagcagattattcaccatctgtggtcatcaattccaaaggaatttttgtttctggtaatggccaaataagcatctatatgaatattttctacagataataaatataaactgtgaacaaatgtaaaaagaaaaaaaaaagaccagccaaaggcactggaaatgaccctaaaagagcatattctgaagagtagtctacaatagaaaagggaaaatgacactgactgagtctctcatttactttagctgttagactaaaggcagttctaaaccatgccatggatagtagccaaaactgcgatagaaagggcattgtctttctgattttaaaggtgtactagaagagagagtttgggacaaccatagctgctagtaagtgagaatacacactgcacaggaaaagagccagaaaaagagaaggtcgccaacttgaaattataaactgtgtccatgtttttagaataatgactttgtggatctgactccaagcaagtcacctaaggataaaataactgaagcaagacttcagctgccacacaaagatagattttgcagaggtgtgatttcaaccaagtaaattacattacagactaaatagaaataaaagattcagaagaagattacaaaactcatgatctccaaaagataatattcataatttccaacatgcatcctaaattactccaaaacatgaataaagaagaatgttttttattctcaagataaatgaaaatcaacagagactgacagcaaaatgactcagatgttggaattggcacaacaaagattttaaaggaattatgctgagtgatgtaaaggaaaatatgtttgaaatgaatgaaaaattaagaaatcacagcaaagagatagaaattataaaaaatgactacataaagacagtaataaggtgtcttttcaatttatatggaagtacaaagttctagcatattcaaagcaattctgaaaaaaagcatagtttaaagcaattctaaaaaagaatagcatagtttaactataataaatgttttcaagaatattataaagctataggaatcaaaataatatggcaatgatgtaaagattgattagcaaagccatagaataaaatttgaagcccagaaatagatttgcacatattgggggggttatttaactttttacgaatatattaaagcaattcaatgaatgtgcagggaaggagtaattcacatgcctgggttgctcaaaccctgtatatttcccataagcatctttcttcagggtgggcccttggctggctcctcaaaaatgagctccgaggctctggaatattctgcctgagaagagtgcttctgtatgtctgacacctccgtccatgtggtaaaaataatgttcaaactgtttacactaattatgtgttttattgtgaacaactgtttttgtaagcctgagactttagattacaaagtacaagtttaaatgggtagtttttgttaacaatgagatttatggtaagtgtatgaggaactaaaatctcaacagctgaggacagttatacaggtgctgcatgcctacgtgactgacccctaataaaacctctgaagaccaaggcaagattgagcttcctgactggaaatacatcacatgtattgccacacatcattgctgggataataaagcacatccataggactccactgtgggaggacacctagaagcccatgcttcatgtcttctagactttatcccatgtacctttacaatttgctaattttaatgtgtatcttttcattgtaaaagacactaaacatggagatagtaggtttttctgagtctagagaatcttcattctctagaatgaagtggtagtggtcatgaggagtctctacccataaataaaacatatttttaatgaatgatactgaaataactatatttatatggaaaaaatgaatctccacccataactcacaatatacctaaaaataattcaaaatgaattattgaccgaaacatagaagcttatacaaaagattttcagaataaaatatggaagaatgactatttgacatagagctaggcaaagttttcttataggtagataagatacaggacaaatgatgacatatggaaaaaatgatatgtttgactttaccaaaaacaaatcatcagtgaatcaaaatactcacaaaatacaactcctacagcaaaacattataaagacaaacaaccttttaaaatgggaaaaatgtttgaacacacattttatacattaagatgtataagtggataataaacacataaaaactgttcagcatcactaagtaagtagggaatggtacattaaagcaacattgtgatatcattacacaccctctaggaatggctaaaattaaaaagactgaaaacatcaaattttggcaaggttagggccaattaaaattttcatacattgctggtaaaaatgaaaatgtcacaaccactttggaaaaaatttttaaaattttttacaaaacttcatatagatccattatatgacccaaccattctactgctagacatacactcaaaatgaagaaacacgtacaaaaagatttctacaagaatgattttagcagcttcacaacaaaccaggtgttggtcaataggaagatgaaaaatcaaaatatagtatagctataaaatacaataatatttaggataaaaataataaatgcatgttataactaataatatcatgactgaatctcaaaaatattttgctgagttaaacaagctttgcacaaagtagtatattatgtatgatcccatgtatagaaatatctagaataaggaaaaacaaattatgatagaaaagatgttgcttctggtgattgggtggagctctgatggactgggaaggagcatgagggagctttgtgggttgatggtaatttatgtaccctgacaggggtttggtttacatagctgtattcatttgtcaaaacttatattaaatggtgcaattaatattgatgcatttcattgtatgtaaattttaccctaaaataattttagacaaattgtaaaacctagttaaagacatatatgctgatattttcagggttacctctcttgatgtctgcaacttactttgaaatgcttcaaaaggaaaataggataatggatggaaatagggagagagaaatggatcgatgtgtaaataaaacaaatctatctaaatgttaaagcttaattgtagatgatgaatgtaggagtgttgaatgttaaattctttcaacttttatgttgaaaaatcgtcataataaaatatttgaaaaatgtatacattgaaatattacagcaagtatactatttttactgtgattttggaactgaagttactattactgatagtatactgaagtatactatttttactgtgattttgaaactcaagataatttcctgaagaaagttttttgacaattttacttttgaaaattcccattgatctgttagttatcttcaaaacgtctggagaaaagtcaggatatatatataacagcaaatgggcaatttctactgttttcattactttggttttagaattgccactactgcttgcttaatatttaaaatttgctggtcttaaagcaacagtctattttccaatcttggggaagattatggtcgtataatataccagatggacgcattagtactgttaaaaaaaaagactagttgcctatatgaattgcaaacttaataaagaaaatgaactaggaagaatgaaataaaaagttctattaggtttattatagtctacaatgttctcactgtccagaaatagtctactggaatttggagatatttcatcattatgcccttatattgtccctattccttctgtttaaatttttataatagctctttaaaatacgttagttgttaccaccttttaatctatctctatttcatgcaagcaataagataaatgactaaatgagctcaatttaacaacattgtaggcatattctcacactttatcttatagatcatcttaacacactcattgcacttcactgaaataccatgcctagttcttaatatcatttctaaacttaataaggaacaagtcaa

SEQ ID NO: 666 - DNA, 2204 bp, Homo Sapiens
gaaatcaattcaacaacaactgccccggtgcttccccgtagatagcaccgctggtcagttcgggaggggatgggacattgaggagcaggacagtcttcaggaagcttacagtctgctttgggttgtttcaggaacacagtcatccctcagaaatggattgggtgacaagtggtctgcatgctgcacacgggcactgggtctctgaatgtaaccaaattgttctcctcttatcattcccattcactggtgtacttgtttgtggagcctgcagaactgcctttttcaagaatggcagcttggcctctaaatctgcttcccactgatgggaagagctgacagaagctttagagaggcacagggtgagttcctaaaaccagagtcaacacacactcttcatctgttttgtgcttcactccctgctcatcttcctaaaacactgagtttggtcatatcatgtcctacaagttgtcaatgatttcccatgatcttgtcttcaggataaagttccttagtcaaaagcaatgaagacctgacctaatctgtaaggcaaaatcaacactttttagcctggccttccatgcccttccatgcccttcgagcccccagagcacccatggcagtccatctctctctacttgtccagagggacactctcttagagccagtggctcctactcacggttccccgaacacgtcgtgggaatgtttgccttcataccttcccagatcattttcctgatctcagacaccctccgtcctcattcattcactcttcaattgtccaacaaatatttgttgctcatgcaacctggatcacccacatagtttcaagactgcatcttctaaactatttaaatcctatccattcttcaagaaatgtttcatgacgcttccttaactgctaaggacccgcagattctcttcctcttgggactcacacactgactcatctcccgatcttttggtgctcagcaaagtggaggcttctgttttggacttagagtcaagaccattaaataagactatgctctaaaaagtacacctccgtggcccggaacgagtgaattaacatctatgagtttccatttccttgtctataaaattgtgaaattgcaacttaagattagttctgaagattaaatgaggtaacataggtgaaaatgctacatttatgtaagaaattactctttcataaggatgtcaatgtttaaatacgcattttctcaattttgttaatgaaatactttgaaattcttttttctaatgaaacctgctgaatgtaaaagagacccgtactaaagaaagataccacatgaagcaccaagggtctctttctggatctatcatgactcttgtgactgtttcagcagcacagaaattaaaggcgattgttattctggaggaagacaatgagtctcatctatatcttgtttgggttgattttgtaaacagaacattccaaagatcattcttgccttttgtttccactgagaactagaataaagtaaaacaaactatcaatttaaggaaagcctcgaaattgttagcaatttcttcagtaactttcatccatcaactgattttatgaacacaaatttgcagaaatgggcaagaaaaactacttaactcattggtgggaagcagtgggctctctaaggagggagagatagcagtgatttcaccaccggaccgtggaacacaaagagcctggaagagtctatcactttcaactgaaaccgcaagaagaactaagtaggttaagccctaagaatgttcctaggtaacctacttgagttgaaatttgactaagaatccttacaccctacctaagagaggtaacgctattaggatcggaagtgattggaagctttgtttcagatctcgtccaaaagggagaacggtcaatgacaaagctgctgtgaatagtattctgggggcgtggtggaaccccgattcactgctatctcccgaatcagcaacttgacagagcgcgcctcccgggccttggaagccttccattccgagctggctgggtgggactcaggttttacggtatgctggactttttccccgtgagttaaaacacatttatagtaactaagtggttaatgatgagaaaaaaccccaaactactgtactaataatcaacctctgctatttggtttgtaaaaaacaaaaatacatctataaaaagggttggccgg

SEQ ID NO: 667 - DNA, 5819 bp, Homo Sapiens
aagtggaaccggagcccgggcgcgggcgcccacgttccattcccgggaaggcctgggaagggagggaatcgctcacccgccagcccgcctgcagggaaagggctcctggagctgtcgatgcctgcccgacgctgagataactcttgggtcccagttatccaccagccacttctgcctcgattcaccaaagggcagggaaagaaccttttggtgagatggtgtgaattagcgacatccagcctgagctgaagtctccagcgggtcaaagaaatctttccatttgcaaactaccaaggctgacttgctgtgcatttggcgggcctcctgcccctgattctgctggtttggagatgctttctcgctctttggttggcttctgtctccacacattgtggggatcccagggattcgtcataggactctcggatcgctggtgcctccactgtgatctccggtctccctgcggccagcactgacttctagcaacagaatcctgcatgagggcctaggcacagaactttatttccactcttctgaacacatctaatgtgatgctctgcaattgtctgaaatttatcctaccctaagtcattatcttgtccccttctctggaacctgcttcacttcccgtatcccaagttctggaagctggacggtccaagatcatgctgccagcagatttgtggtctggtgagggtctactttctggttcatagactgcacctcctagctgtgtcttatggtagaaggggcaaaagagctcccttgagctgcttctctaagggcactaatcccatttgtgagggctccagccccatgatgtaatcacctctcagaggccccagctccttataccatcactttgaaggttaggatttcaatgtatgaattatggggggggaacacaaacacccagaccatagcatgtggaacaccgtctgacatgtacgtgctaatagtgttagaagtagtctttgctcttatatcttaattatgataactgttttcatctatgataattgcttttgtggatgtctttgttagtgttagaagtggtcttagctcttatatcttaattatgataactattttcatctattataattgcttttgtggatgtctttgttccagctaggctgtgagtttctggagggctccatgccaatcctagaggcttctataacaaatacttactaaacacctactatatgccaggcacaatactaggagagacggcaattcattaaataggggaaaagcctagctctcatagaggtgagcttatattttacagggtttgaggggatttagaagagagattgcccaggctggcatgggtagggaaggtaggtagggccagatcataggaagcctcagatgtgtgttaaggagtacagactctctatagttaatgataacataaataggccttttttttttctttctagagtgtcagttcctatttaaaacaaaatctgaaatcttcctgaaactatatcctcacccttaaaagaattcaaattgattggaaatgtgtctgcacatacataattcagagttatatgtgtgcttacccaaaattttctttacaaattattgcaagaaatgtaatcattaaaaattcgcagcaatttttgtgtaataccacttaaatagcatttggtccattgcaccctaaatcttacattttggagtttcaatattaatttcaatcttaattttcataaacccaacaccagccatctaatatatttcctgttcaaatacttattcattccttctggcttactaaggttcccttttgtgcttttatgttaatttgtttctcccctttagagtgcccagcttttgctcaagcaggccctgaggctgtaaatttctctccctacccacggaattccttcctttaatacccatctgaagaccttacttctaataagaaattttccattattaaataagtgacgtgcacaaagtttttttcatctcatttccacaatcctgttgtcacattacaaatttccatcatctgtagcatctggaaataccgagtgggatagataacatggcctggctgctgtttgttttttttttcatcagtgtgctagatcttcctggacacgctgcacaaatctcacctcagtcttagtgccaccgtggacgctggaaggagccattttaaaaggcaaccttaaacagttcagtctaatttaatattagtggcctccacacctctgactcttgtattattagaattgcctgtttggcttttattttccagtgtgaactgatgaaacagacacaaagtgaagtacccgttggtttcgcggtctccacctcgagaggaaatccaaaaggagtttctggcatgtgtggtgttgcttagcaatttacccaaacaaacatgtttcctcctcatttttttccccagtacttatttactcaagaacattgtaaaatcaatttttaccacttgacatctgaaatcattagaagaaaatctggtgttttgggctttatgagaagaactgctaaccacacatgaatgcagtatgctgctaccacaaattacgcagttgagtttcccacatttggagaaatcacagggatcagcaagtcttcagtggaatagagaagccttgccctagggaaaactacccttgtggtcatggtatctaccctgcctggtgaagaaggtccttgcttccccttctccttccgccatgattgtaagtttcctgaggcctccccagccatgtagaactgtgagtcaattaaacctttttcctttataaattacccagtcttggatagtagctttatagcagtgtgaaaatggactaatacagtagcctttgacctttcttcttaaagataaggatattagcaaatgtaaactttttaccaacaaacaccttttaaaataaatatcttttacatttgccaaagtctataaactttcattttgtggtacaacagtaaatataacttattttatatattttaatttttcattgttcactaccagtacttttttaaaagtatattatctttatagatagtcattaacatattgttaaatttatattttatagaagatagttcctagtattgtttaatttgtagagataaaagagaaaatatgcagatccaacttctaagagcattcaatattatacaccaagcttattcctgaaaacaatgacccagaaaaccacatgaaagagttttattatggatatcctaaaacaagtaactataagtttcagatatatatagaatattccacagttcctataataaaaattcatgagttttctgatcaccttcaatgtttgtactgagttaacacaccgctgttacattaaagcaaaccattaaaaataaagctagttttctctctttttttcaacttttattttagactcagaggtatatgtgcaggtttgttacctgggtatattgtgtgatgctgagatttggggtatgaaagatcatgtcatccaggtactgagcatagtacccaatagttagttactaccagtactttactaacatgaatttttcttccttgaatttttttctctttatttaaaccttctggagtagattttttattaggtgttttttttttggtttgttttcaaagaacaacccattaatgcttcattattccccaaaactgtttaaaattaagaaggcctttctgttaccatagacataaaacgaatggattgggcattatatttttcagtttaatcttttctcctcctctttaggattttctaaatattcctccactttcctctgccattaaatgttgttatgggaaaagtaggaggtcagattaaacccattgtttttctctcaggctgagtagatgagtattttattatgattattatttggcccaaaagttatgtctgtttagtgaaattattattattactattgttattgttatcctgctctcagatacatctttctgttgattattcagcataattatttacctaggagatattgtgcatgtttaatcagcaaattcaaatttttacttattttaacaaggttttcttcttttataatttcaaataatctgctgtttcattaattctgtaaatttagcaatacctattacgcatatgttgagctactgtgtcatgtttctgtattatctcctttctaatttctctttctgtcattttctatttttatttttaataggatttttataaatcttgaccttcatattattgtaccattcatgattttgtggttttaaaggtggcttttcttttcctaattatttattgaaaatctttaattcctcctgtgaattctgccagctcacttttcatttttccatggtcatgtattttattttatatttttcattcttttttaaagttaaaattatttttaaaggatttctgttcctggctctgatggagcaacacggacagatttaccctcttacttaaacaaaatacagacaaaatttataaaggatggttctgaaacatgggacaacaggcagtataaacagtaatttttcaaagaagataaaaaaaggaagtaaaccctatggtttctctactgattccctagaaagagatttcaagctatcagtctcactcaattgagaagacagagttcattgagaatttggggaaagtcaaagtggacagaattcacaaagaactaaaaaaaagagtattgtgcagagaaagagctccagctacctccacagagtttcccttgagttttcagatcatgcgtttggtgaacccacctgaggcaagggaaagaactaccagaaagaagcaggtggaaaaattcctgatgttcacatagaccgggaaatttctcaagtttttgtcatctgaattgaagaaatcttatactgtatgaggtgttgaagagaatactcagaaggacaatgcctccgtagtaggaccaaactagcctagagtaaaggctggtctgtcttgtatgactccttgtgaaactattctgctgagtatgtcaccaattttcttagcgaatctaagtgattccaagtaataagttgaaattttcactatttgtatgtttttattgattattcattgtggttctaatagtttttggtttataatattttgttggtctgttatttgctgcatagtggtttatgatagttatatctttattggatctttaacaatgtagaataagttctttgtttcatttcatgttatttgtttctaaattttacttcttatttaacagtaatgttgcaaatctttaaaaatgttttactttatttgtaaggaaaacacctaaagcaaagtgaaacaataagtgatgtaggatctattattattattttccatcatgtgaatctttgtcttaacagagaggcttcgtctatttatatttgttgttacaattgatttctttcatcattctgttatttcagtgtttctcttgaaaaataggttcttgttattcaatgatttagttttcactttatgtatcgttttctttattttgtccttcatattttgcaagctatatagcctctgttaaattccattaatggatatctttaagcactctttgacatgtaattttctaatgtctcagtaaataaagaatttgtcaacataaaatgtgtgtgtaggccaggtgcggtggctcatgcctgtaatcccagaactttgggaggccaaggtgggtggatcacctgaggtcaggattttgaaaccagcctgaccaacatggcgaaaccccgtctctactaaaagaatacaacacttagccggacgtggggg

SEQ ID NO: 668 - DNA, 9609 bp, Homo Sapiens
gcgccgacgctcggacaccgcccccgagtgcgaggcccggcgcggaaccggcagccgagagcctggcgggggcggggcgcaccgcgccgctcccgggagtctccgggctgcggtcgcggaatacgactttgatccgcgggtgagggctctgtgaatgggcaagcaaagccctctgactccgggcctcgtggctgggtgctgtgtgttaagcgcctgcgctgtactaggaccgggcgtgccgccgtcggcaaaaagtgacgctttcttgaagcacaaagtccaggggggacgaccaagcggacagcggatgcgtcctgcgccggtagccaggcgaccggtggaagagcagagtccagcgcgggcgatgcggcggggccaggcttgctgcgccgcggggtgattgggagaagagccttcctgcggggtggaggacgaagagctgccctgaggaggtcccggagtctggtgggaacggcctcttcgggactgctccgagagacggtgtgcagagcctggcgtgctcgccgaggtctgacaggcagcccggggctaggtcctgttggatttttttttctaaggaaaatgggaagtggtggtagggtttgagcagtggagtcccgggcagttttaaaaggatccctgcagctgccggctgggagggcgtgggtgcgcgtaaggccggaatcacagagaccaggtagaagatgattacgagaacccaggaacgtggccctcaggaggccggcagtaccaaggggacagcagctgggaggagagaggcaggagatggtcaggggccagaccagggaaggccgcggagaccgcagaattcgctctgaatgagtggggaggcccttggaagagtaaggggtccaacttaacttttttttttttttttttttttgacacagagtctcgctctgtcgccaggctggagtgcagtgcgatctcggctcactgcaacctccaacaccccgattcaagcaattctcctgcctcagcctcctgagtagctgggattataggcacgcgccacccagctaattttttgtatttttagtagagacgggttttcaccatgttggccaggatggtctcgatctcctgacctcgtgatccgcccgcctcggcctaccagagtgctgcgattacaggcgtaagccaccgcgcctggccaccaacttaacttctgccaggatcatgggaagtggtagggtttggggtctgatttcaagagggagctgctgtggagtatcagcacagcttactgagatatcagaaaggccttggtaaagagccctttactgagacagggagcacattttggcagaggtttgaattggagcgtgttaagtgtagtgtcttcttcaccactgtgacgtgaggtcctggcgcaaataattgagcacagaaatacatgtcaggcattgctaggcacaagggtacagccagtgagcagggctgccatggtccctgccctcttagagctgaccttcaggtctgagggagactgaaaaataagtaagaatacctccagccgggcgctttggctcacgcctgtaatcccagcactttgggaggccaaggtgggtggatcacctgaggtcaagagttcgagaccagcccaaccaatatagtcaaaccccatctctactgaaattattaaaattagctgggcgtggtggtgggcacctgtaatgccagctactcgggaggctgaggcaggagaatcgctggaacccaggaggcagaggttacagtgatccgggatcgcgccactgcactccagcagcctgggcgacagagggagactccatctcaaaaaaaaaaaaaaaaaaaaaatacacctccaatgctgaaagctacgaaggaaacaaaaccatgtgcgagtgatagggcagcccctctgggaagtgacatttgtgcccagatctgaagaaagaaaaggagccactcatacagaaagactgagacaagatgagctttcgggacaagtcaggctctagggagaacacctgacgaggaaaatgcctgggcagtttgaggaactgaaaagccagtgtgtctggagcttagtgagggaggcagagagcacgggaggtgtggttaccaaggtaggtgggaccggctctggccctgggtaaaaagtttgactttcattccaagagtaatggaaaataatgaagaattttgaactcgaggtggtgcatgcctgtaatcccagcactttgggaggctgaagcaggcagatcgcttgagcccaggagtttgagattagcccgggcagcataacagggcagcatctctacaaaaattttatttttggccgggcgcggtggctcacacctgtaatcccagcactttgggaggccgagggggggcagatctcctgaggtcaggagttcgagaccagcctgaccaacatggcgaaaccccgtctctactaaaaatacaaaaaattagccgggcatggtggcacgcgcctgtaatcccagctacttaggaggctgaggcaggagaatcgcttgaacccgggaggcggaggttgcagtgagccaagatcacgccacttgcactccagcctgggcaacaagagagaaactccatctcaaaaacaaacaaatccagaccagcctggctaacatggcaaaaccccctctctactaaaaatagaaaaattggctgggcatggtggtaagcacctgtaatctcagctgcattggcggctgaggcaggagaatcacttgaactcagaaggtggaggttgcagtgagcacagatcacaccactgcactccagcctgggcaacagagcaagactctcaaaaaaaaaaagttttgaagggagcagatccactttaaaagctcacactggttcttgagtgatgaccaaatggcactgtgccttatgcagagccgactcctggcagtttgcacaggctggaggtggagctgcagactccctctccctctcggccttgcctctgtaaatgggaaagccgttgacattcacaaaagaggggcagggaactgctacacaagagcagctacacaagagggtcctttggtccacacaggaaacaagccatagtgatgacatattttgaagctgttagatgttttgtttccctagctggctattatttttgtatggcttgtctttctcttttgagtatgtgtgagaacaggatgggttaacattagggaagagcacagaagaggaaggaaggaaagaaggaagggagggagggaaaggagagagaatagggatgagaagctcagcttgtagaattggcaggtgatgtttgcagtcattaatcatttgagaagtagagagagaagccaagcaggaaatcttcatactggaaaagaagtgctcaccattaaaaaaaaaaaaaaaaaaaatccagtgtggttcacagctgtaatcccatcacttggaggctgaggcaggagaaatacgtgaagccaggagtttgagaccagcctgggcaatataacaagacccacatctctacaaagagaaaaaaaatgtaaaaaaaagaagctttaaacctaagacggcagaattcaagactgttgtccttgagaacttcctggctctggaaaaagctcagtgagttagtctcatcctgtcgttagctctgttttttaggggctcactttgtcttcacgacagtaccttgcaccattctcatgggtatcccagggtggtgcaaggcagttttctgcacttcccagaatgccctgtcagctggcttctgggtaggttctgcaaattggaggcccctgtgaaagatcgctgtggggtgggaggaagaagctttatctgcctgctggctgcagggtagaggactgcagtggggttatagggatcaccacctgcacatgtggagctttgagcggcttcactctaagtttctgctcaacagtggcagccctggagtccttcgggggcgagtgtgggctcctgggctccaggccaggggcagtcccagcttcctgatctcgaggtagcgtctcctcccttttgctccatagcacctcgcccttctcagtgacgtgcctccttctcagtcatgcgcctccagctctaacaatgtccttgaaaacaattcttgaccatgcgccgtggctcacgcctgtaatcccaacactttgggagtctgaggcaggcggatcacttgaggtcaggagtttgagaccagcctggccaacatgtaatcccagctactccctccacttgatttgtgttccttgaagaaatttgcataatccctgtatctggttggcagatagcagagatgtagcctcagtctttcctttaaaaattttgctttaggcagggcgcggtggctcacacctataatcccagcacgttgggaggccaaggtgggcagatcatgagagcaggaatttgagatcggcctagccaatatggtgaaaccccgtctctactaaaaatataaaaattagctgggcgtggtggcacaagcctgtaatcccagctatttgggaggctgaggcaggagaatcgcttgaatccaggaggcagaggttgagatgagccgagatcacgctattgcactccagcctgggcaacagagggatactccatctcaaaaaaaattttttgctttagggccaatcgtggtgacacacgcttgtaattctggcactttgagaggccgaggcaggtggataatttgaggtcaggggttcgagagcagactggccatgatggtgaaatcccatctctactaaaaatacaaaaaaagccaggtatggtggcatacgcctgtaatcccagctactcgggaggctgaagcaggagaatcacttgaacccgggaggtttaggtggcattgagccgagattgcaccactgcactccagcctgggtgacagagcgagactccatctcaaaaaaaaaaaaaagggccggacgcggtggctcacgcctttaatcccagcactttggaaggccgaggcgggtggatcacctgaggtcaggagttcaagaccagcctggtcaacatggtgaaaccccgtctctactaaaaacattaaaaaattagccgggcatggtagtgggcgcctgtaataccagctactgaggaggctgaggcaggagaattgcttgaacccaggagacagaggttgcagtgacctgagattgtgccactacactccagcctgggcaacaaagcaagactctgtcttaaacaaacaaaaagcccagtgtggtggtgtatatttgtggtcctagctactttgaaggctgaggtgggaggattgcttgagtacaacatgtagaggctgcagtgagctgtgattgtgccactgcaccccagtgtgggtgacagagcaagaccctgtctcaaaataataaaattaacattcattaacaataatgttaatatatatgttaatgtatatgttaatcgtaatgtttatattttaccatgataaaaacattttaaaatcatatatcaactcttgccgttctcctgttgaaaactctccaatgacttcccactccatcatcctgtgggatgggtccaccatgctggaccacaaggctctgcacaatgcggctcccaccagcctctccccttggcccagattgcttcctcctacccctttctctagctgccaggccccccaacccccgcatggagcccttcagcagctctgtgagctccctgcctgttggcagccatcacagcaacgggctctggtgtgccccttgttatccctgtattcaggccattatctgtaatgacagcctggcataattttattttcacaatttgtataattatattctattgagctaaatgatcattataatcattattaaatatttattaagcacttctagctgtgcaaacataataagatgtggcctcagctcttaaaatctttcttcctaattccaacccaaattcatttcaacttaaccaatcttccttcttggagaaggagggaacttcggcgttttgtctgggtttccatgcccgagcttataggagcttcttagcaatgctgtggagcagatgctattgacttcagtttacagataaggaaacaatcagactgaggaagctagtattaataagtagcagagattaagatttgcctgtggttcttttttacacaaagcctctcccactcctttcatgcactgttagccaagtttactagaataggcaacttcctttttaaaaaatcctgtttacattttaggtgccaaacactgtgctaatccagtgggggaaacatatgctcaaaaagatcactctgagaccaggcatggtggctcatgcctgtaatcccaagcctttgggaggatgaggtctgaggactgcttgaggccaggagtttgagatgagcctgggcaacatagtaaggccccttctgtacaaaaaatttaaaaactagccaggcctggtggcatgtgactacaggctgcagtaagctatgatcgtgccactgcactccagcctgggtgacagaatgagaccctgtctctaaaaacaaaacaaaactcaagcagtatcctaagtcagggtccaagcagtaatggaaatgggtgaagctgacaggcgagtgatagagaatggaggggtctgtagcaaacgtgacgactctggcttacctaagagggcagccaattttgccatgaggcaatgtgggatcagtgagtgctgttccagtcttcaatttcgatttataagtaaaatctccaatattttatatgttggcaactttggcattcctttccttaaacctcactgccaccccgcaccccaattcatttcagtagggatcagatagccaacatccttataaaatcaaaagtatacaggccgggtgcagtggctcacacctataatcccagcactttgggaggccgaggcaggcggatcacgaggtcaggagatcgagaccatcctggctaacatggtgaaaccccgtctctactaaaaatacaaaaaaaaaattagccgggcgtggtggcaggcgcctgtagtcttagctacttgggaggctgaggcaggagaatgttgtgaacccgggaggcggagcttgcagtgagctgagatcacgccactgcactccagcctgggtgacagagcgagactccatatcccaaaagaaaaaaaaaaaaaagatacaaatcttaattggcataaaccagtcctagtaatatcatgccctttggccagtcgttggtcacagggtgagctaatgacccaactctgacaaattacatgtaagaggaatactgctaaaaagatattttcggccaggcgtgggggctcacacctgtaatcccagtactttgggaggccgaggcgggcagatcacttgaggtcaggagtttgagaccagccttggcaacatggtgaaaccccatttctactaaaaatacaaaaattagccgggcatgctggtgggtacctgtaatctcagctactcgggaggctgaggcacaagagtcacttgaacccaagaggcacaggttgcagtgaaccaagatcatgccacggcactccagcctgggcgatacagtgagactcagtctcaaaaaaaaaaaaaaaaaaaagagtatcttttcttcagtaaaaagacaaagctgtttgggtgcagtggctcacacctgtaaggagaattgcttgaacccaggaggtagaggttgtagtgagctgaaatcataccactgcactccagcctgggcgacagagcaagacactgtctcaaaaaaaaaaaaaaaaaaaaaagacaaagccttgagggctgaggaagaaatgtggaaactgccctttccctttgttcttgtctaatgcagtcacaaagtctggagcagtagcagccatttttcaaccatgaggcagtaagcatgaagcctaaaaccagcatgccaagaaggacaaagcagaaagactgaaatctctaaggcccttgcagacacccttactgcatcagttccagacttggctcccatagctccagatgtggccatggccactgtatatgtaagcttgatggaataagcactaatgcggcaccttagagctgctggaaaagagaccaatggacatgtacgaatgggggatcctgccatttgccgagtaaaggcctcctgtgtagaaggtgtcctttgataagcattcacatggaatacaaatctccactcatctctccccaatccaaaaggttcatccacaccccctctccagaccttcttgtctttctgtctccaaacatgttctttccaagtttctgaaccttcaaagtgttagtgactgtccgtgaactggagtagacccaacccttctggctttcttgcttgctttttttttttttttttttttgagatggagttttgttcttgttgctcaggctggagtgcaatggcgcgatctcggctcaccacaacctccgcctcccgagttcaagcaattctcctgcctcagcctcctgaatagctgggatcacaggcgtgcgccaccacgcccggctaattttgtatttttagtagagacggggtttctccatgttggtcaggctggtctcaaactcctgacctcaggtgatccacctgcctcggcctcccaaagtgctgggattacaggtgtgagccaccgcacccagcccacttccctgttgattctgtctctctggaagaaccctcactaataaactttacttgaccttcaaaataataatgctcaaaagacaccctcatttggggtgccagagtctggcatttgttctctaccagtgcctggtagcaaatctgaagctgtgtaatgcttaaatggagaatagtcattttcagaggagggtatatctttgctctaaaccccttggagtctgtgctgtgacttttattttttatttttttttttgagacagagtcttgctcttgttgcccaggctggagtgcaatggcgtgatctcggctcactgcaacctccgcctcttgggttcaagtggttctcctgccccagcctcctgagtagctgggattataggcacccaccaccacacgcagctaattttttgtattttttagtaaagactttaaagacatttcaatttcaccatgctggccaggctggtcttcaactcctgaccttaggtgatccaccgcaccttggcctcccaaagtgctgggattacaggagtgagccactgcacccagcctgtgctgtgactcttatactggtccctgccagaacttacaggagcatgacctgtcacggacaacctgagcaccactggatctgcagggttatctgtcaaatgggtcggagcagcatactcaaatgtggtcgctattatctctaaaagtcaaggaaagccagcagtgcaggacactcaaatccagacgtcattccactagctaagctaagcaaacagttggagctatcccagctgtcgaagctaacacgctgcatttagactctcttgcaagtcagctgtgttggtaactagaggctctggattgacacattagaatccactcccatacattccccaggttttggctggtaaaaattgattgatatcccataattccttcagcatgtgaacttctc

SEQ ID NO: 669 - DNA, 1851 bp, Homo Sapiens
gtagaaatgagcaattgcaactagaagagcctgtgtgcccacaatcaagggtaaggaggagtgtcatggagcagctctctactgccctgagaatgacatccccactgttcaccatggccttaaatcccctgcgaattccacctcatcctctgccacttcccgtcactgctctgaagatgccctgatcttgtttcagtcccttggatgtacccagctcttctccatctttgcatgtgtcatagcctcttcctggaaaacccttcctgctgctcatcccagaactgactctccatgtatttactcttattttgagagaagggggcatttccaccaccagaagggaacttgctgtcttggtagccattgtcccctgacacctggcacatctactctatacagtcaccattcaagtggatgttgaatgagtacacttgtttcacagtttggttgggtaagccccaaagcttggttcccggtaggatcaggctttatgagtgggctgagtttctataaaagtctccctaccagtttccaatcttggtgaaactatgtctgtgggcacaaatgagaaaacttgccattcgtatcaccggttacccagctgtggaccatgtgggccaggtccacagaagagccttatcctactttcactttttatttcctgcagtcatggggacagtggggcaccaccttttcagaaactctaagaaagagtgttcatgaaagtggccagagagttttacaattttgccattaggaatgattaaatatccatgactaatgcctctgtgattaaattgtattgggagttccaaagtttgctttttgtgctttaagagtaaaatgagaagaaagcaactgaacttctcatttagaaaatatttcttctctccttggccaggtgcagcagctcacacctgtaatcccagctctttgggaggccaggcagtgggaccacttgatgccaggagttcaagagcagcctggccaacatggtgaaaacccatctctactaaaaataaaaaaattagccagacatggtggcatgcacctgtagtcccagctactcgggaggctgaggaaggagaattgcttgaacctgggaggtggaggttgcagtgagccaagatcatgccactgcactccagcctggacaatagagcgagactctatctcaaaaaaaaaaaaaaagtaaaaaaaaaagaacatttcttctctcctggacccagaagcaccttccagacatgaatccaggaagtaggaatgagagctgccactgcagggtagaaaatgcaagtaaaccttatacgagatgtaacacccaggcagggtgagcctcaggaaatgggaacgctccaatggcacggctcatctggactgggccactctgagtgccagaatttgtataacgttttagatttgcttagatataggaatatacaagaaggagaatatataagaggatttagcagtggttatttctgagaaacagggagtacatgtagttttgggtttttttcttagctggatttttttaagtttctaaaatgaacatgatttacttttggaattttttaaaaagcattgaatatttaaaatttttaaaataataggcactcattaagcaaaaaaattataaaacagtgaagttacaaaggaagaagaaaactgttcaaatctactatttatgtttggggtttttaaaaattgtattttttaaaaaaataaactggtttgtcttatttagcatagctataatgatactgtatataaaatatttttgcttgcattcttcaacttatttcattataagtactttccatgttattacttagtctttacagcactatt

SEQ ID NO: 670 - DNA, 3134 bp, Homo Sapiens
ctctgcactaatataccagatcctaaaatgcatataaggtggactagcatcttaattctgctagttgattgtgtctttactgaaaagaacccagctaccaatttgcctttttttacaccacaaatcctaattagaaacttgaggttttatagaaatcatttaatgatagagattacatatgtgaattaatgtgaatatagtatctgtgcttcctgtgtctatgactattttaagatataattgtgctgcgctatcagattaacatttggaagtttctagaacagttaatgctatttacagaaaggagtagaaactcatcaactggcactctctttgatttttatattttaaattaactctcttcgatctcaaagtatattttacgagtaattttattaggaatctcttatagtgccccaatgggataagctatttgcctattttcacagttctgaacttggaaagaagcaaagtatatgtaactaaaccacatatttgtctttttattgctttttcccttcttttatatgctaaatcaaatatagatttgtggatagggaagcaatatgtgaatcacaatgtagcagaggcagaccaagcattacattattatttagagctggactgcaccaattacttgtcctcgtgccaaaggcaaatatgtttgcacctttttttttttttctgattctcaggttgattaatactgctaatgcaaatgctcaagtagatgtttaaaaactttacaaaatagattcaagtgatactttcttttaaaagtgaagagttgatgattacacatagtaaattcatgaactacagtaggtttgtatcaaacaattttttttaatgaaaatctgttgaggtgtacacaatatgcttcttgattgtattagtccttggtctctgctagacctcatgagtttcatcatttagaaaaggggtagaggatgaactaatgtctccttcagatgtaaacatgaaatacctagagttttacttgcttttcaatacactgaataattttaaatgattctgacactgatgtagaccctttgacttataaattctgaggaaacaactgacagcataaaatatttacattcttataacacagcacagtgactttcttctttcaagattgtagctcagagaaaagatacaggattcaattgggggttcaataggatagaaatggagagattcctttgtgttgtagtagaggcattttcctaaggagtatagatttatactttgcattttcattcatcatcccccagaatcatggtcaaggtgtaggtcactccacacagctgatgctcaggttattcccttgtgagaattatgagaataaagctcccaagatatgtgaaagtgcttaacacagtacctggcacacagcactcaataaaagtttggctctattatgggatggttcaattctggtttaaggaaggaagaaaggttattatatatgtaccactaagcaaatatatatatatatatatatttggggttttttttccctaatattatttgggtgtcccctgtgcttctttaggatgtagttataactaaacctgttatacttgaacatcactaagagaagtaaattattatgaagctagcaaaaatcttgaggccaaagttgtttcttaacagctttaataatgcttgttgattttgaataatcctttaaaaagtggaccatttgcttattttaatatcacgtcagtaaaatgttagtattaaaaagatcagctttttatggcattgaagaatgtatctgctaagacacaaaaattgcatggtaagtataataggtggaggaggaaaggttgtaggccggatgaaaatttaactgactagaacatttattcaggagtgtaattattttcccttaccccaatccctgtgtacgtgttgggtatagttacgacattatccggatttgcaaatagacacaactttcagtcttaccctgtttattgtttaagagtgatagactgttgtcctcttgctggtggaaaatctaaggtggagcccactcttctatgctgaagttcaccaggcagagcagttttcttacaagtcagctactctgcttggtttattttaggttttggtacttcacgtaagcactgttagaaggtacaagtgtattaatatcactagttttgaggcgcttgggtacatttgtttttaatatatttagaatgtgcagtaaacttttttctcatttttttttctttttagcaaacttgttattttaggtccaattattgagttgacagtctactgtgagaatgagatgacatatctactgtgagaataccataaatgatgaatagtttatttgagaacttttatactcagtggtgttttatatattaagataaaaatatgtacacacatgcatgtcacatctctctactgtggagttaatgtgaatttttaaaaaatggaattgcaaccacaatcatatctaagagaacattcactcctagtgagggtttacaaaagctactaagagaataaggtagatgataatgcaaagggtcatgatttggggttatttttgttttattttaaaatttatactgctacttttgaaagaattgtttttatgactatgctctttttgtgattgaaaagtcatctaatagaagctgtatagaagctactttttaattgctggcaaacagctttaagtgcactttctttgattacacttccattttttgttaaacttgaattttctgaagccttttatgtaccactaagcaaataactttaacctttaaataaagcaaatttacatctttattgtatttctacttgttacaaaacatacttgctaaagtaacttcagtcctcaaatatagctgggaaacaattatgagatagactcagtctccccctcccaccccttttcccctgccatatctaattaagcactaactgattttattactttattgcctttacactgcttattctttttgactgaattctgtccctgattcactgttttgtttgaaatttaaagttattttcttactgtatttatcatacctgttttaatctgttttctttaaatgcaataaatcccaaatggattgcatattctttat

SEQ ID NO: 671 - DNA, 24702 bp, Homo Sapiens
agctctgcccacttagagatattcccctcactactgtctttcaggacactcctaagtgattgcctgtggcacttgcacatcaggactgtcacctttgggtccccccaaaaactagggcagcaatggaaaaagggcaggctaggccaagagtgaggaataaacagtctttattggctttggactaggagtccttgggtcttgagtatctctgtgtatttgtcgatattcttcagattcttctcagcctgtttctgcagcctcataaactgctccttctccctttgcccctccccattctttctcctaatggatcttgaccttctccttcctcttctcctccagaatggctgtcactggttggtacttccaggcaaatttatgaaccaggtgccccaggtaggcaaacttcagtgtgggcttcaggtgcacaaccttgagtagagtagaaatcaccatccacttttgcaaagggcagggcacagggggtgtggatcccatcaaataccttgaggtggtccaggtggccaggcctcacttggttttatggggcaatataccactcatggttcagccaaaagatgcagttaggtgcccgaaagtagaagagacccagaagtggtagggtctaaagacagagttggtgctcctggtcttgtggaaggttagatactgaaacttgttcctgtagaagttgacaaaaatgctgatgtccttgcagtgcaggacctccagcttcctgcccagcagtacttgcttggccattatgaccaccaggcaactcaggagaggcctaggccatcgatcaccagaacctgccccttcaacatcttcaacagccacttggaaaaggccaggaactattttaccaaagggatttaagtctgcactgcagatggcatgaccttgcttcataaccatagagatctgtgttgtgattcttcgaatgggatttgatgtaaacttttttatttttacaaaggcaaggaaattcaaacattgaaatgcttaagaaaataaaaatctttccaaatcctataactggagacaatttgtcgattcatcaatatcctagtgagcattattttaaaccttttactatatatttatacaaatagaactacgtctgtaatttattttttatttattatttactctgtttatagagacagggtcttgctctgtcacccaggcaggagtgccatggcagaatcaaactcactgcagcctccaactcgtgggatcaaatgaccctcccacctcagcctccccagtagctgggactataggcacaccaccacatctggttgttttttgtttgtttgtttgttttttgtagagatggtatcgctgtgtttcccaagctgaccttaaactcctggtgtcaatcctccctcctcagcctcccaaggtgctttggttataggcatgagctactgaacccatccaaattgctgctttttgattaaacactatttttatataacataaattaaccagtttgctatagataattcttaattgagtggtactgccctctagagtatgttttgtgtctcgactatttacatgatgaaatacatattttgttataaattactgcttttttcacattacagttagtatattttgttgtatgtacctatgactttcatttcaggactgtaagggagtgttacaaagtatttattataaaaagggcatgaagtcagctgggattgagaagcactgcttgtagatggacacagagtatcttcaattttcaatactaaaaatattctgatgaacatctttgtatattcatgttttgcagtgggtttgttaggccaaatggtacacatgtgcagaaatttggcacattgtaccaattcacctatataccaacagggcatgagagtgccagtttcctcatatattcaccaacaataatgttgccatggtttggatgtgattattttgccaaaactcatattgaaatttgatccctgatgtggcagcagtattcagaggtgggacctacttggggatgtttgggttacggggacaccactgtcatgaatgccttccggctgcaatgagttcttcctttctcaggaatggattattttacatcagagagagcagcttgctaaatagtgcctgggttccttggattctctctcttgcttcctctctcaccatgtggcctctttgcatacacctcccccaccttccactctctaccatgagtgtaaggaagcagtacaagaccctctctagatatagctgcccaatcttgcactttccagccaccaggatcatgaaccaaacaaatctattttctgtataaattatccagcgtcaggtattccattacagcaacactaagtggactgtgacaaatgtagtcctcttgcatatgccagtcactcttcccttaaaaactagttaagattttcttaaaatttctattctgtgtcttggggtagagtccttcaagtgattctgaaagttccaggattttactttatttctagtaattcctgggtttaatttctgactttaattgatttctcttttccattttttaaaaataacagctatactgggatatacttcatacactacacaattcacatatttaaagtgtacacttcagtggtttttagagacatgcacagagacatgcaactgttactacgatcaattttagaacatgtttttcttttcttttcttttcttttctttttgttttttgagacagggtctcactcatttgcccaggctggagtgcagtggccagtctcggctcactgcaacctccacctcccaggctcaagtgatcctcccacctcaactgcccaagtagctgggactacaggttcacagcaccatgcccagctaatttttgtgtttttggtagagatgaagtttcaccatattgcccaagttggtctccaactcctggcctcaagcaaaccactgacctcaacctcccaaagtgttgggataacaggcgtgggccactgtgccctgccgcaatatttttttcatcaccctctaaaaccccatatacctcagcagtcactccctattttctcataaccccccagtcctaggcaaccactaatctactttttgggtggatttaccctttctggatattatataaaaatagaatagtcaagtatgggggcttttgccactggcttcttttacttagcataatgttttcaggatttattcatcttacagtatgtagtagtacttcttttctattgttgaataatagtctgttgtatatacatatcacattttatttatccactcatcagttaatgaacatttgggttgtatctacattttggctattatgaataatgctgttatgaacattcttgtacaagtttttgtgtagacatatgttttcatttctcttgggtatatatctaggagtgaaatgtcatatggtaactctatgtctaaccttttgaggaactgccaaactgcttttccaaagcagctgcaccatttgacattcccaccagcagtgcatgagagttccagtttcctcatgccctcaacattgcttgcaatagtctgtgttgttggttattgctattctgttgagtgtggattggtatctcattgtggttttaatttgcctttccctgatagctaatgatgctgaacatcttttcatgtgcttgttggtcatttgtgtatcttctttgaatgtcacttagatcatttgcccacttttaattgagctatttggttttttattattgagttgtaataattcttaacatattgtagatacaagtctcttattagatatgtgtttgcaagtattttctcccattctatggattgtcttcattttcttgatggtatcctttgcaacacaaatgtttttaattttcatgatgcccaatttatcctttttttcttcccttgagtgtgctttggtgtcatatctaagaaactattgtctcatctaatgtcacaaagagttatgcctatgttttcttccaagaatttagcagttttagttcatacagttaggcctttgatccattgatttttgcctatgtatatgcataaattttctgtacatgcaattttattattttgcttctggatatgcagttgtaccagcatcatttgctggaaagattatcctttccccattgaattgtcatgacacccttttcaaaaaccaattgaccatgaatttgagagtttatttctagacacttaattctcttccattgatctatatgtctatctttaatgccagtaccttaccattttggctactgtagttttgtagtaaattttggaattgggaagtgtgagtctttcaactttgctcttttttttcaaggttgtttttcctattctaaagcaaattcaaacttattctaaaggaaattcaagagaatttccatataaattttagggtcagcttgtcaatttctgtaaaaaatttaactgggatttttacaacgataggttgaatctgtagatcagttgagaagtattgccattttaacagtattaagtctttcaatccagcacatggaatgccttttcatttatttaattcttctttaatttattttaataatgttttatagtttttaggatataggttttacagttttttggtttaatttattcccaactattttatacgttttgatgctattgcatcagttttcttacttttattttcagattgttcattgcagcatatagaaatataactaattttcatatatcaatcttgtagcctgaaaccttgctgaacttatttattagtttgtaatgatgttttagtggattccttaggattttctatatacaagtttgtgtcatctacaactatagttttacttctttctttccaatctgaatgccttttacttctttttcttgcccaattgccctttctacaacctccaatgcaatgttgaataaaagtggtgagaacagacattcttttcatttattgatcttaggaggaaagctttcagtctttcatcattaattatgttagttgtggcttttcgtagatatctttttttttttcttttttgagacagggtctcactctgtcacttaggccggagtgtagtgagtggtccaatcttggctcacggcagcctcaacctcccgggctcaagcaatcctcctactttagcctctggagtatctgggaccacaggtgtgtgccagcatgcctggtgtttttttttttttttttttttttttttttttgatagagaagaggtctcactatgttgcctaggcttgtcttgaactcctgggctcaagcaatcctcccaccttggcctcttaaagtgtggagattacaggagtgagccaccatgcccacgcctgtaatcttaacactttaggtggttgaggagggagaagtcggaaggagatgcctgatgaaagacatatcttttatcaggttgaagaagttcctttgtattcttagtttgttgaatgttttcatcctgaagggattttgtcaaatgctctttctgcgtgtattgatataattatgtcatttttgttccttatcctaatgatatggtatattaaattaattaattttctaatattagccagcttgcattttagggataaatcctacttagtcatggtgtataattctttttatgtgtttctggattccatttgctagttctcttctgtactttgcaattgattctttgtcaatgtccagatattaggccaaatggggggtatgtccacttcctgatatttccccagataagactgttttggtcatttttcactcattctggtgcctggaaatggaactctttatgagtcttgctagggggaaaagtcaatttcttactgtaagaattaaaacaaatttttattactatatgagtttaatattatttcttactataagaattaaaagctaggcatggtggctcatgcctatagctgggaggccaagatgggcagatcgcttgagcccaggagttcaagaccagcctgggtaacatggtgaaatcctgtctcaaaaaaaaaaaaagaaaagtcaggtgtggtggtttgtgcctgtagtcccagctacagaggaggctgaggaggcaggattacttgagcccaggagttggagcttgtagtgagctgtgatcacaccactgcacggcactccagcctgggcaacacagcaagaacctatctcaaaaaaaaaaaaatagaatttaaaaaaatttacttttgcaatcttccttggtgctagggaagaggcatatgatcattcagacacacgttaattaatatttaatttgggagtgaatgacacctaaagtaaggtctttctctctttctacagcgatactgttagaatagcagaatcaggcttgaggcatgatttagggtgtttttctcagctatttagtctcaaccctagttctctagttctcttagtaattcatggcactgcccagttttttttacttttatttttctttttgatcaccatgaacaaacaatttccttttagtaagtcccgtattgcttaattcagccagggtccacttttattaagagcaactagtagccttgtcagataaaacactcacacatggcattgttgttagttgccttatactaataattcaggagatgatgtcagagattacatcaatgaagaaccatacagaaaataatttaatatcaaatatttgactttcatttttaaaagaatagcattgtccatttctcccaacatggccccagccttccacaaggtgctttactccattctctttacattttcttctcccggctccatccctaaatccttgatcatttcttaagtagaggagtttatcttactcttttttcttgccaatcccaagtaagttttaaagaacttttcacaaataaaagcacctcttttcctaaaacaaaatggttccccttttgtttcattccacctgatatggtttggctctgtggtcccacccaaatctcatctcaaattgtaatcctcacatgtcaagggagggaattgtaatctccacgtgttgaccgagggaggtgattggatcatggggcagtttcccctatgctgttcttgtaatagtgagttctcatgagatctgatcgttttgttttttttttttctttttgagatggagtctcgctctgtgcccaggctggagtgtagtggcacgatctctgctcactgcaagctccgcttcccgggttcacaccattctcctgcctcagcctccggagtagctgggactacaggcgcctgccaccacgactggctaatttttttgtatttttagtagagacggggtttcaccgtgttagccaggatggtctcgatctcctgacctcgtgatcctcctgcctcggcctcccaaagtgctgggattacaggcgtgagccaccgcgcccagccaatgtgatggttttataaggcggttttccctgctgttgctggctttctctcacccgctgctatgtaagatgtgtctcttccccttctgccataattgtaagtttcctgaggcctccccagtcatgcagaactgtgagtcaattaaacctctttcctttataatttacccagtttcgggtatttctttatagcagtgtgtgaacagaccaccacattagaattgcatgttgctttgtcattgccaatctgacaggtaacaaaagatatcacacttatacaaactcacatttgttgcatttattgttgttgttttgggacagagcctcactctgtcacccaagctggagtgcagtggcctgatctcagctcactgcaacctctgctttctgggctcaagcaattctcctgcctcagcctcccgagtagctgggattacaggtgtccaccaccatgcttggctaatttttttttatttttagtatagacggggtttcaccatgttgaccaggctggtttcaaactcctgacctcaggtgatctgcccgcctcagcctcccaaaatgctgggattacaggcatgtgccactgtgcccagcctattgcatatttttaaattagagactaagatttcttcttttctgaattgtctgttattttaactatttttccatgttggaatattagtctttttcttattcttttgtagattcttttaagctcttcatatacagggaatattagtacatagcataaatattgcaaatagttttccaggttgttatttggcatttgacattgtttatgatgaagttttgcttattttcctaaaaaccaaaacagaatttttggttttgtttctaagaaataaaagctttcaagcttttcctttttgacatctagatttcatgtcatctttagaaaagctgcccccactgcctttggcacaaaaatcatataactgtttatgtgtcttttttctccacctgtaattcattaaaaattagaaaactgatgtccagattgataatacgacttgcccaaggtcttacaactaattaaaggaaataggctacagaaaagatggtgctcctactgaaagcagtaatgcataattagtggtacacttcttaattaaaaattttaatgttaagtgagttttttaccctttaaaaattatggctattttctggaagcttttttaggaaataaaaggaaatactctcttaaacagtgataattcaaaagacacattgggacttattacacaaatgaatattcagagtcataattttctttattaaaacatatgggagaccaagcacagtggctcacacctataatcccagcactttgggaggcttaggcaggaggattgcttgaggccaggagttcaagaccaccctgggcaacatagtgggaccctgtctccacaaaaaataaaaatgaaaaaattttattttaatttacttttttttggtttctgtttttgttttgagatggagtctcactttctcacccaggctagggtgcaatggtgcaatcttggctcactgcaacctctacctcccaggttcaagtgatcctcctgctttagcctcccaagtagctgggactataggcatgcaccattacacccaactaatttttgtatttttagtacagacggggtttcaccatgttggtcaggctggtctcgaacccctgaccgcaagtgatctgcctgcctcggcctcccaaagttctgggattacagacgtgagccactgtgcccggcctgatttctagttttatttcattgtggacggaaaagacttgtcatatgatgtctgcttttttcaaattgtgtagacttgtttcattacttgagatatggtctattctgcagaatgttccatgtactgatgaaaagaatgtatattctgcagcagctgggtaaaatgttctgtacatgtcacttaggcactttgatctcatgtgcagtttaatttcaattttttttgttgattttctgtttgtatgatttgaccattactgacaatggggtgttaaaaccccctacaataatattgcagtctatctctccctttatatctattagtgtttgctttatactcttgggggctccattgttgtttgcatacatatttatttatttattttttgagatggagttttgctcttgttgtccaggctggagtacaatggcccgctcctggctcactgcaacctctgcctcctgtgttcaagcaagtctcctgcctcagcctcccaagtagctgggattacagacatgtaccactacacctggctaattttgtacttttagtagaaatggggtttcaccatgttggtcaagctggtctcaaactcctgacctcaggtgatcctactgcctcggcctcccagaatgctaggattacagccgtgagccactgcatccagctgggtgcatacatatttataactgctagttcctcttgctgtattgaccccattattattatatagtgatcttctttgtctctttttacagtctttcacgtgtagtctattttatctgacataaatatagctactcctgctttttcttggtttcctgttgcatagaatatctttttctatcctttcaccttcagtttatgtgtgtccttataggtgaagtgggtttcttgcaggtaggatagagttgggtcttgtttcttcatccattcagcaactgtatgccttttaattggagatttaagtccattttacattgtgttattatggataagtaaggacttactattgccatttgttgcttgttttctgattgttttgtaacgcctctttttccttcttcctttcttgctcccttcttttgtgggtaagtgattttctctggtagtatgttttaactctttgcttttaatttttagtgaatctattaaaggtttttgtattgtggttaccatgaggcttacaaaaaacatcttacagatataacaagttgtttaaaaaagacagcttatcttagatcaaaaatacaataatagaaacaatcaaatataaaaaatgaaagcaatacactttagctccttgtatcccgcattttgactttttgttgtctcaatttacataatttatatataataattatattacattatatattatgtaacatataatatatatcattatgcatattatatataattatttttacaaatttttacctcaagtacattttttatattacctatctcttaacaggttgttatgccttttttaaaaaattagatttgcatttcagtatctttgtactagagttgtgagtggattgattgcacacataattacagtattagagtattatgggtttgtctatatgcttaatttttaccttggattttataccttcaaataatttttttttgcatgttagtgtttttcttttcctttcagactgaataattccctataatagttcttgtaagatgggtctggtggtgttaaattttctcaccttttgtgagaaggactttatgcctccttcatatttgaaggatagcttttctggatacagtatactttgatagcagtttttagaattttggcactttcaacttaccattctgctttctcctggcctatatgttctccatagagaagaccgttgccaaacaaattggagctcctttatatgttgattcttttattttgccacctttggctcctctctttgtccttgacctttgagagtttgattattagatgccttggggtagtcttatttggctcaaatctgtttggtgttctctgaccttctggtaccttgatatttatctctttctcaaggtgtggagagttttctgttattatttctttcaataagttttctaaccctgctgttgctcaactccatcttgaacaccagtgattcttacatttggtctttggagataattttccatatcttgaaggcaatctttgttcctttgtattctttttcattatttctacttagacaatgtattttcaaatatcctgtcttcaagttcactgattcttttaaaattgtgtttattttttatttcaatagcttttaaggtacaagtcatttttggttacatggatgaattctatagtagtgacttctgagattttagtacactcatcacctgagcagtgtatgctgtacccaataggtagtcttttatcgctcccccctccccactgagtccccaaagtccattatatcactttgtatgtctttgcgtcctcatagcttagctcccatgtataagtgagaacatacggtatttggttttccatttttgattacttcacttagcataatggcctccagcttcatcccacttgctgcaaaagttactgcagaagacattatttcattctttttttttttttttttttcaagacagagtttcgctctgtcacccaggctggagtgcagtggcacaatctctgctgactgcaagctccgcctcctgggttcacaccattctcctgcctcagcctcccgagtagctgggactacaggtgcccaccagcgcgtgcggctaattttttgtatttttagtagagacggggtttcaccatgttagccaggatggtctcgatctcctgacctcctgatccacctgcctcggcctcccaaagtgctgggattacaggcgtgagccacagtgcctggccttatttcattcttttttatggctgagtagtattccatgatatatatatatatatgtgtatatatatatatatatatatatatatgtgtgtgtatatatatatatatatatgtgtatatatatatatatatatatgtatatatataccacattctctctgtctactcattggtgtcaatgggcacttaggttggttccatatcttttcaattgtgaattgtgctgctattaacatacttgtgcatgtgtctttttcatataatcttctttacttttgggtaggtacccagtagtgggattgctagatcgaatgatagatctacttttagctcttcaagggatctctatgctgtttcccacagaggttgtactaatttatattcctaccagcagtgtaaaagtgttcccttttcaacacatctacaccaacatctattgttttttgactgttttatcatggccactcttgcaggagtaaggtggtatctcattgtggttttaatttgcattttcatgatggttactgatgtagataattttttcatacatttttgggctatttgtatatctttttttgagaaatgtctattcgtgtcttttgcccactttttgatggattttttttctaattcatttgagttccttatagattctgcatactagccctttctcagatgcatagtttgcaaatattttctccttttctgtggattgtctgtttactctgatgactatctcttttgctgggtagaaacttttttgtttaattaggtcctattcacttatttttgttattgttgcatttgcttttggggtcttggtcatgaattcttttcctaggccaatgcccagaagtgtttgtccagtattatcttttagaatttttattgtttcaggtttaagacttaagtctttgatcagttttgagttgatttttgtataaggtgagagatgggaatccagtttcattcttctacatgtggcttgccagatttcctagcaccatttattaaatgggatgtcctttccccaatttatgcttttgtatgctttgtcaaagatcatttggttgtaaatatttggctttatttctgggttctctattctgttccattggtctacatgcctatttttatatcagtaccatgctgttttgataactatagccttctagtatagtttgaggttgggtaatatgaacaaatccagatttgttcttcttccttatggtttctttggctatgtgggctctttttcagttccatatgaattttagaattgtttattctagttctgtataatttgaagtccagtaatgtgatgcctccagctttgttctttttgcttactggggctatttgggctcttttttgattccacatgaagttttggattgctttttattgttctgtgaaaaatgatgatggtattttgatggaaattgcattaaatctatagattactttgggcagttatagttattttcatactattgattcttttatcatcatgggatgtgtttccattcatttgtgtcatttatgatttctttcagtagtgttttgtggttttctttgtagatatctttcaactccttggttaaggatatttctaggtattttaattttattattatttttgcagccattgtaaaagggattgagttcttaattttattctcagcttggccattgttggtgtatagcaggacaactgatttgtgtacattgattccgtaaccttagactttgctgaatttatttattaggcctagtaatcttttggatgagggatgagtctttagggttttctaggtatacaatcatattgagaggtgacagcgtgctggcagtcctcacagccttcgctcactctcagcgcctcctctgcctgggctcccactttggcggcacttgaggagcccttcagcccactgctgcaccgtgggagtccctttctgggctggccaaggccggagccggctccctcagcttgcagggaggtgtggagggagaggcgccagcgggaacaggggctgcgcgggtgtttgcgggccagctggagttccgggtgggcgtgggcttggccggtccgcactcggagcagcgggctggccctgccgccctgggcaatgaggggcttagcacctggtccagcggctgcggagggtgtactgggtccccgagcagtgccagctcacccggtgctgcgctcgatttctcaccaggccttagctgccttcctgcggggcagggctcgggacctgcagcccgccatgcctgagcctcccacccctccctgggctcttgtgcggccggagcctccccaatgagcgccacccactgcgccacggcgcccagtcccatcgaccacccaggggctgaggagtgcaggcgcacggcgcgggactggcaggcagctccacctgcagcccccgtgcgggatccactaggtgaagccagctgggctcctgagtctggtggggaagtggagaacctttatgtctagctcagggattgtaaatacaccagtcggcactctgtatctagctcaaggtttgtaaacacaccagtcagcaccctgtgtctagctcagggtttgtgaatgcaccagtggacattctgtatccagctactctggtggggccttggagaacctttatgtctagctcagggattgtaaatacaccaatcggcactctgtatctagctcaaggtttgtaaacacaccaatcagcaccctgtgtctagctcagggtttgtgaatgcaccaattgacactctgtatctagctactctggtggggccttggagaacctttacgtccacactctgtatctagctaatctggtggggacctgcagaacctttgtgtctagctcagggattgtaaacacaccaatcagcgccctgtcaaaacagaccacttggctctaccagtcagcaggatgtgggtggggccagataagagaataaaagcaggctgcaagccagcagcggcaacccgttggggtcccttccacactgtggaagctttgttctctcactctttgcaatatatctagctactgctcactctttgggtccacactgcttttatgagctgtaacactcaccggggaggtctgcagcttcactcctgagccagtgagaccacgaacccaccaaaaggaagaaactccgaacacatccgaacatcagaaggaacaaactccagacgcgccaccttaagagctgtaacactcactgcgagggtccacggcttcattcttgaagtcagtgagaccaagaacccaccaattccagacacaatatcatcggcaaacaatgctagtttgatttcctcttttccaatttggatgtactttatttctctctcttgcctggttgctctggctaggacttcccgtgctatgctgaatagaagtggtaaaaatgggcatccttgtcttgttccagttctcggaggaaatgttttccacttttcctgattcagtataatgttggctgtgggtttgtcatatatggcttttattattttgaggtaaatcccttctgtgcctagtttattgagagtttttaatcataagcaatgctggattttatcaaatgtgttttctgcatctattgagatgatcatatgttttttgtttttaattctgtttatgtgatctatcatatttactgacttgcatatattcaatcatctctgcctcgatgggatgaaacccacttgatcatgataaattttctttttgatatgctgttggatttggttagctggagtttgttgaggattttttcatctatgttcatcagggatattggtctgtagttttcttattttaatacctttcctggttttggaattggtgatatggacttcatagaatcatttatggaggattccctctttctcttttatttgtttatttggcatgtgtctcaagatattaccccttttctcaatctttttgaatagtttaagtaaaattggtaccatttctttctttgaatgtctggtagaattcagctgtgaatctggtcctcggctttttttgttgttgttggcaattttttttttttattattgattccatctttctgcttgttatttgtctgtttaggatttctatttctttctgatttaatctaggagggttgtatgtttccaggagtttatccgtttcctctagattttctaacttgtgcacataaacgtgttcagagttgtcttgaattatcttctgtatttctgtagtatcagttgtaatgtctctggtttcatttccagttgagcttatttagatcttctctctattttcttgattaatcttgctaagttctatcaattttatcttttcaaagcaccagctttttgttgcatttatcttttgtatttttggtctcaatttcatttatttcttctctgatttttgttatttcttttcttctgctggctttaggtttagtttattcctgtttctttggttttttgagatgtgaacttaggttgtcactttgtgctctttcaggctttttgatgtcggtatttaatgctatgaactttcttcttagcattgcttttgcttttgctgtatctcagggattttgataacttgtttcactaccatcattcatttcaaataattttaaaatttccatcttgattttattgttaacccaaaaatcattcagaaccagattaattaatttttatgtatttgtatagtgttgaggattcttttgtcattgagttgtagttttgttatactttggtctgaaagatatttgagatgatttttattttcttaaatttattgagacttgttttgtgacctattacatggtctatcttggaaaattttccatgtgctgatgagaagaatgtgtattctgcagttcttgggtagaatgttctgtaaatatctgttaagtctatttgttctagaatgtagtttcagtccattgtttctgtgtttactttctgtctcagtgatctttctagtcctgtcagtggagtatttaagtcccccactaatattgtgttgctgtcaacctcattttttagatctagtagtaattgttttataattttggaagctccaatgctaggtgcatataaattcaggattgtaatcttgttggattggtcttttaaccattatataatgaccttttttctttttgctgttgttgctttaaagtctgtttggtctgatataagaatagctcctcctgctcgccttttgtttccatttgcatggaatatcttttccacccctttaccttgagtttgtaagagtccttatatgttaggtgagtctcttgaagacagcagatatatggttttttattttttttatctactctatcatccagtatcttttaatcggaatacttaggccacttacattcaacattaatactgagatatgagatacggttccattcatcatgttagaattacctagatacttttttgttgtgttatggttttataggccctgttttatgctttcaagaggttctatttggatgcatattaagcttttgtttcaagatttagaactccttttaacatttcttgtagtgctggtttggtagtggcaaattccctcagcatttacttgtctgaaaataatttcatttcttcttcatttatgaaatttagttttgctggatacaaaatttgtggctgacagttattctttttaaggaggctaaatgtaagactccaatctcttctagtttgtaaggtttttgctaagaagtcttctgttaatttgaaagttacttgctgcttttgtctcacagctcttggcattctttcctttttgttgactttaggtggcctgatggtcatgttccttggtgtaatctttttacagtgaatttctcagttgtttgtttgtttgtttgtttttgaggttcttgtatttggaaatttaaatctttagcaaggccagggatgtttttctcaattattttctcaaataagtttttcaaacttttagccttctcttttcctgcagaaacaccaattattcttagctttggccattttacataatcctgtatttcttagagactgtgttcatttctttttattctttttcctttatctttttctgactgagttaattcaaaagccttgtctttgagctctgaaattctttcttctacttgttctaatctattgtttaaactttccactgcattttatatttctctaagtgtgtctttcatttccagaagttctgactggtttttctttatgatatgtatctctctaagacacttttcattcatatcctctttttttttttttgagacacggtctcactctgtcactcaggctggagtgcagtggtatgatcacagctcactgcagcctcgactacccaggctcaattgatccttcgatctctcagcctcttgagtagctgggactacaggcatgtgccaccacacccaactaatttttatattttttgcagagatggagtttcacaatgttgtccaggctagtgttgaactcctgagctcaagcaatccacccgccttggcctcccaaaatgctatgattacaggtgtgaaccactgtgcctggcctatatcctgaattgtttttaaaatttctttatggtggttttcacctttctgtggtatctcttcaagtagcttaataaccttctgaatctttatttggtatttcaaagatttcatcttggtttggatccattgctggggagctagtgtgatctgttatagaactctggttttttttgtgtgtgtgtcaccaaaattaacttttctggttccttctcattagggtagactatttctgttaagtattcttgaatttaagatttcttttctttctttctttctacccttaaggatgtgactttaatgtgtgtagtttattatagcctaatttggttggtcgtgcttttagggtgatgactctgtatgagttccttggttatggagagtgtttgtatgatagcttcctcagatactggttgtagaagctacgtacttggtgtgtggataagttcactatctcctatggggttggaatgacagaggtcttttgaagcttatcccatttccgtgtggtgtgcacttatttatttatttatttatttatttatttatttatttattccccagtattctatttactgagttgatgattcaggtctcaggtgagtagggaagattttcctcggtagaaactggttgtagctaaagcaggtgggtaagtgcaatggccagtggcgggcagagatcccagccttgatgatggtagctgggggagctctcaattagatgcactgaggtcttaacaggggaaagggtaggagccaccccagctccccctgccaggccagcaggaaagctgtccacctcccagactcactcctgtcccaatgtttcagctattcagattagacaggcaccccttttcttctgcatgaatgttgatgttccacatagagaagaactgtgactctgcctctcatggaagcctgaacctggaaggtgctcctcctgtggagatgcagtcaccctgcaatgttccaggaaggatgtctgtagatgcacccatgctgagctaccatgggagaagcctcagctgtgtctgtagtggtggacaaggagagaaagaagaccccttcttcaagacccttcatgagcaccaaggctgcctgactgttgggatagtactgcagactttccctgctgagcccagcactgcaattgcatctctacagaaagaaacttcccaccagagtgaagatctggaactcaaagcttgctgtccagattcttttgtcctatgaggtgttcctttcatgtagtgttctccctcttcccctaggagtaggagtttctgagagccagactgcagtgattgctattgctcttctgggtctagccacctgtgaggctgccatactccaggttggtgccaggaaatgtctgcaagcgatctggtgatgtgacctgtcctcaagtctcctagcagtgggtaccagcaccagctctgatgagggtggcaggggagtaacgtaaactctgtgagattccttggttatagatagccttagcgtgctgtctttctcaaatgctggttacaatagtagtaaactggtcatgtggacagactcaggacctcttgttgacaatggtgatagctgaggtcacacactggttttcttcttcctgggtggtatgttagtgtgcctgcagatgctgtaatggactgtcagttaccctccagccagcaggtggtgcctgcaaaagagcagcagcttcagtagtaactgtgggatttgagcttgccttatgttgcccaggggaggtattttggtttctcaggtgatgggtgaggacataaagttccccaaaatttctgtcctttgtgttaagctaccagggtgtgtggagggccataaccgggtggggtctgagtcaggtgggtctgcattctgactccctgtgtgtggggcaagctgtgacccctgttggggtaggaaggtcattcttaagcctctgaggtaatgttccataggtgagtgtaactgctctgctgttcagaagaacttgtacaagaggtggggagtaacatgtggcagtaagcctcacttagatcccacacagttggccaggctgatctcactcccacagtgccctgctagtagcactgggctaagtttcaggtagcctgcactcagaactcaaaccttcctcaggccataaactttccccatgaggataacaaccacagctttcaggccacatccttccccatccacctgcaaggatgggtgcctggctcctgtgctcacaaatatagcatactttccacttgccgtccccacccctccagggttctgaccaagagaatttgtccctacttgatgttatattgtgaaattcagttgggagttgtgactactgtctgagctggttggttgactttgctgaggttcctgtgagatataataaggaatggcttcccttggtctgcactggagattgggaatgcctgcaaggcacttcccactgctgcttctacttttatatttcactgctccctaaatcagttcctgttctgtgttggattaaggccttcacctgtggcctggatttttaagttccttaatggggatatgtatcctggaggcagtctctcccactctaacactctggggacttagtttttggcctgtttcatggtgtaggctgaagcctgccacttctttcaaagagtctgtggattctttcacttttcctgttaagttcctgtattgcttcttggaaaaaagttcacaatgtgaatctctacacctattttgtccttccaagtggagaggcatgctgacattgcctccaattccccatcttgtgggggagaggggaagctcactgattctttcctctgcatgatccattctgctattgaggaccccctaatgaattttttagttcagccaatgtatttctcagttccaagatttctgtttgatttcattatttcaatctctttgttagattttttgataagattctgaattgcttttctgtgttatcttggaggtcattgaattatcttaaaactgtgccttggtgtgtgtgtgtgtgtgtgtgtgtgtgtgtgtgtgtgtgtttggagacagggtctcactctgtcacccagactggagtgcagtggcctgaacctgacctactgcagccttgacctcctgggcttaagcgatcctcctgcctcattatcctgagtacctgcaactatcaccatgcacgtatcaccatgcctggctaatttttaaattttttttgtagagatgaggtcttgctatgttgcccaggctggtcttaaactcctgggctcaactgaccctcctactttggcctcccaaagtgctaggattgcaggtgtgagtcaacacacccagcaatttgctattttgaattcttggtcagagagcttacatattgccatctctttagggtccgtcactggtttcttgcttcattagtttgtggaggtcttgattccctgtttgctgttgtttattgatgatgtgaatctatgtctttgcactgattatttatttttccagtcttctttgactagcttgttttttttttaattggatatttttcttagactttttttttttttggtaattttcctgttgaatttctattttttttttttttttttaagatggagtctcgctctgtcacccaggctggagtgcagtggcgtgatctcagctcactgcaagctccgcctgctgggttgatgccattctcctgcctcagcctcccaagtagctgggactataggtgcccgccaccatgcccggctatttttttttgtatttttagtagaaatggggtttcaccatgttagccaggatggtctcgatctcctgacctcatgatctgcccgccttggcctcccaaagtgctgggattacaagcatgagccactgcacctggccttcctgttgaatttctttcttttttttcccactagattgctgtgtccatttagcactagatagtattttaagcccaggtttgtttcaggtctagaaaaggatcagagtgctgcctgtcccaaatggagaatgccccaaaagtacatcccagcagtatgggaaggctggttaggggttcatgtccaggagacctatggaacacttttcctacagcatggtgctgctgaacattcactctggtttagtatcatctttggctgagttacagagcagtttccagggtaggggatggcagtcccaccatctccctttgtctctggctgtccacagggctatttctcccattaggcattcacaatgcttcctgtgggttggggcagggacatgtcttctgtcatggaactcaacatagtggggaagctgattattcatcttgatctcactttttccagtgtaaaaattgtgagttgaggagaaattttctgcatgtttggtttggggcaaattgagggaaggggtgttatggacatggaagtctgattttcttatcatctactcagaggtttttcacttccctgtgaccccaggaactgctttatcttcatttttgagttctgggatattgctggtgataatctcagcactgtatgccacttttggaactggaagcccctttctgtctcagattgtctttatctctttttcattcttgaaggatagtgttgccatgtatattattatttgattgtttgtttgttttttcccacagcactttgaatatatatcatcccatgccattcagacctgcaagatttctgctaaaaactagtgatagtctcatgaggattccctcatatgtgacatgttgtttttctcttggtgttttttcaaaaatctttctttgtctttgacaatttaattataatatttctcagtgtggatttttagggttcatcttaagttgggttctgtaagtttcctgcatctaaatgtccatttcctttctcacatttgatactttttcagccattatttcttagaataagctttctgcttattttttctctcgctgtctctcttcctcttctgagacttctataatgcttgtattggtctttcttaatggtgtgctgtatatcccttaagctatctttgctgtttttcttttactcctctgatgaataattccatgtgatctttctccaagttctctcattttttcttctgtttgctttactcatacattttacccctcttttgattttttcagttcagctattggtattcttcagctccatgatttgtttggtcctttttaaaattttctctcttagttgaaattatccttttgtttttacattgctcccccaagctcatgaagtattttttgtgacacttattttgatttttctctgaagtaatttatatattcccatttcattaggatcagtttctggagtttaatctttttcttttgtttggataatgtttctttgtttcttaattttccttgattcttcctgttgatatctatgcattagaaaaaactttaccatctcccagtctttctggatttgtcttgtacaggagaagagcttcaccaatcaacctggcccaaacttttgtgggcctctcaaaccttcatgctagttcaaacttctgtctttgttcttagtggcttccagacctttagagtatgccaggttctgtcaacattcttagatagctggaaaagaagccaagtcatcaggtagctcctatagaagttggaagtctaggtgcatggtccaactctttccctctccagggataagctggttgctgaggtttttggggtttttgtttttttatccacttgctctgaattgagccatagagaggagttgtgctgactgcctggatactagttcaaaccactgctttgttctctgtcacttctagaagacagtgtatgccaggccatgtcaactttctaagacaggaagatggaagccagctcctcaggtagcacctaaataatttggggc

SEQ ID NO: 672 - DNA, 9119 bp, Homo Sapiens
agaagcacactgaaacctatccaaaagcatcccaggagggcacactgagtgccgcatggagcctgcaccaccatggggaggaagcagccaccgccttcctgaatccccaccaggcagaaacatctctcccgtctttgaacttcaccacgccgtgcatcttcctctgggtgtgcaatcgtcacctgcgtacatgattgattctgcccccaacactagactcaggcagaaagaactcaaagctcagatggtcagggtcctgttggttcatcaagctcagcctgcctggaggcagccactgtgttgttccctctcttcgtcctccctctgcactctctcttgccacgggacatttgcacaagcagttccctctaactggaacactaagaaatatggaagtaaaaggggttgggagaaaagacaggagtcacaggtgactgtgtgggatgaggagagtcgtgaaaactttttttttttttttttgagatggagtctcgctttgtcacccaggctggagtgccagtggtgccaatctcggctcaccgcaacttccacctcccaggttcaagcagttctcctgcctcagcctcctgagtagctgggattacagttgcctgccaccacgcctggctaatatttgtattcttagtagagaagaggtttcaccatgttggccaggctggtctcaaactcctgacctcaggtgatccacctgcctcagcctcccaaagtgctgggattacaggcatgagccactgcacccggccgaaaacattaagagtaggtggatgttactttggacaccaaatgaagaagtgtgccgagctgaaagagaaaaggagaagaaaatggacatgacatttacggggttcctcttgcagagagagaaccgtgtagaaggtaagctctcactactgagttcaagtcccagacataatacttgctggctgtgtggccttgggaaggcccatgagcactctcagtgaaagtgaaactgggaagtttctgctttggagagattttctcacaaatgagatgagttatcatataccaagcccttagagcacggcctggctcacaggaagccaacagtaagtgtgggtcattatcagcgctgttgttaactgggggtaataacaggggccaggggccaagaggctttatctagccctatttcagaggcaaagaaatgagggtgaaaaagttcaggggcctgcctgcagtcacacagcagagccagatatgaacatcgacgttttggctttcaaggtccacacccgccgtatcctactgcacggtgctggaaggcacatggaagactattgcagcccaatcttctcatgacaaagacaggaaaatggagccctctaagagaaagtgactgatccacccttatgctcttaaatggtaagcgtccagggatcatccaagttaagatggcccacacgcagctggcaaggcaggacccgaggctgaatgagacgtacaattggctccacggtactggcagaacccacagctagttttcaatgctgagaactgtccatcctggcagaggctcactgccctctgtgccctccctggttgcctgggcagatggtgagctctggttgccaaggagcccgcgttggcagttctgaaatggggtgcgtcagcagcctcgctccagcggcttcccacatccttgagtaaccaccacacaaaggtgctgggcatgagaccaagggtgcggcggagatcgaattagtaatacacactcggtgaccctccccagccaggtttcactgcgtgcttatgaccaacattcatcccttccttagcatctgtggtgtctttaagggccaagtaaaaaggtaaaactgcagggagtcaggagggggaaactggcctggggtacagagtccctcacaatgaaaatatatgtaactggctacttgtaggtcatgatgcattaagtgatcctgtcaaaagttgaaagtgggctacagtgggacaggcaatgcccagagggaggcagaaaggtgtaaataatccgaggtgaatgtgggtcttgttggcatggtagatttatgccctgccttcataatgtaccctttcatcttgggagcctggattccaaaaatctagtctagacaggaattgatggtgctacctctcagcttacatcgttcaaggtttctcaacaccaaagactcctgaatattgatgggaacaacccacttagccaggggatattgctcagaactcaggaggccaaaggcatcattcttccaggcacggaggccctgctcagaaacagccctacagaggcagagtcactcattctgggggatgacgctgccttttgtcttcatctccccaagtgggagacaagtcccatcacgcctgccacctggcagtcagccttgcgccttctctttcgtccttttcatgtgtgctccgtgccggtttcagcagctttcatcagagactgaaactaccaccactcccatcacctcccagggccatgggcaggccctggctgacagatccaggcctaggagcctgggcaacgataaataggtggttgggaggacctctccgagcccccttctctgcccaggcaggctttctccttgggtggccagagccagggcccaggatcccctgctgcaagaactgagaggctgaggggcttcactcctgaggaaggtcctctcttcctaatccccgtgctttgggcccagcaaattcagcctgggaactgggggctgctgtggaagagagatggagctagggagcatttatagtgcagcacctgaggctgagcagtgacagagctgcgggcctgagaattacaaaacagacttaaacagatgaaatattgcccaggcatggtggctcttgcctgtaatcctagcactttgggaggccgaggcaggcggatcacttgaggtcaggagtttgagaccagcctggccaacatggtgaaaccccatctctactaaatattagctgggtgtggtggtgggcacctgtaatcccagctacttgggaggctgaggcaggagaattgcttgaacccgggtggcagaggttgcagtgatctgagatcgtgccactgcactccagcctgggtgacagagccagactctgtctaaaaaaaaaaaaacaaaacaaaacaacaacaacaacaaaaacccatgaaatattaactgatgcagggaaaacagacaaaaactatacatgctcaaaacaaaacgaaaaagggcacagggctcagaaaccagtttgtcgtctttgtgaacagctgggaactctgactcatgcactgtcccctgttctctatgccacaggaatgaggcagcaagaggccagattctgccggagacagagcagagagccaaaccatcgccacttattggtgcatgaacctgggcaaggcaggggtatccctgagcctcagcttccttgtttgcaaaatggtgacatgcctacttccagagctgttgttaaggttaaatgatgacgcagtttaccatatgccaggcacatagtaggcactaaatagttgcaattattagccctgagcaaacattgctcagccattcccttgtaaagcctattctcaaaccaactttccatgtggacgttcaatcatctttctggatgacctcgccttacccattgcctcagattctgtgtgtgtgtgtgtatagaagaaacaaagaaaaaaagtgcttttcacatagtgaggacatttccccatcctatgagtctgtgtatgtgtgtgcatatgtatatgtatgtacacacacacacacacacacacacacacacacacacacactgccccgtggaataggcaggacggggttgcatttcccctcttttaaaggtgaggatgctgagcctcagaaagatcaagtgacctgaacaaagtcacacagccaatgtgtttctccaaaagaaatgaccaggagtcagtgtttctttatacaagggtgtccaatcttttggcttctcggccacactggaagaagaagaattgtcttgggccacacataaagtacactagcactaatgatagctgatgagctaaaaaaataaaaataaaaatcacacacaaaaaacagtgttttaagaaagtttacaaatttgtattgggctacattcaaagccgtcctgggccatgggttggacaagcttgctccaccataaacacgtgatgaacagacattgaaatcgtacctttagggctgttttaggaacacaagaggcatcatctggctatcttgagaaagcagatttcaattttctattcattaaagaaatgtgcttccatctaccttgaaatcattttgatgatttccagattcaagtccctgaataaattccagggaaagtcacgtcacgggacagaatggccgtcaccttgaaaaaaaattattttctcctggaggcactactgaggctcagcgatcccacgtctgccactccctcctactgcatgtggtatccctgagtctccgctcagggaaaacagacaaaactacacatgctcaaaacagaacaaaaatgggaacagggctcagaaaccagtttgtctggttccagtcatttccaccgcaatgacagatccagtgaccttggcagccctcatccattcaccacatcttcccattaccacctaacgtgcccctcccaatagctccgtgtggtagaggctgcacacaggctcaggattcccacttcacaggtgataatgtcaaggtgcagtgacatgcagcttcttgtcccaggtcaggtgtctcatgattgttgagccactgtcttctgactcagccagtgatctttcctttggaccacaacccctctgaaaagcactgtgctgagaaacatgggtttactttacctattgctattttgtacgtttgaaacgatctttccaaaacagatttaataattgaaagttttgctctctgttccttggagaaaagggacatgctttgaggaaggaattggaacccgaacagtcatgttttataggcattcatgtttatttctctgatattatggcttcctctggaaaaatccaaccaacacatccgtttcaagtcttgagaaactcccaaatgttgaccatgtgtctgattcctgtgtggtcaaaagagtgatgtttcttaatgtccacaacttatttccatgttaaaataattccacgctcagctaaatcccacttacacacaagtgtgcacctgttaaaataggtcatttttcactgctaatcttccagattccatgagtatgtgtgggaaccccagacaaatgcaacttgaatgtcacaaaaggcatttttctttgctgagtgaccctggttggcccagacaccctgggtgccttgctcccacagatttgtaaaactaaggaagatccctttctgctgagagaatggattggaattaaatcttagcatagaaggccttgggtgaaactgtatggaattttgtcttacaactgggttattttttaattagatttttgtcgatcttttttcaactctgaagtatgtcagtatggaaactcagtaacttttctcaatgctccccataaagctaaaaattaaaaagaagagaagagaaataaaaagggaaaaaattaaaatttcagagcaagaagctctagcctctgagattttgttactgttgcaaaagtaataggtcatctttgccacaacctcaatgctaaaaagtagatgcacaaaaaagcaatttttatcccaaagtcttcttggcgatgagattttttttcctgcttcagatttggcatgcttccagaaacccaagggccctaaatcaatatcaagtgaccgcttccaactcgtaagagcctctagggctcattgcaaatgtgggctctgggttccagagagacaggcttaaagaaattgatggcaaaaatgggaagctctgtggctgacctcagttgcaggatccgtgctgggacagcctgtcctccgctccatgatttgtgagggcctgcctggtattgctaatcttcctgacagtttagtttgaagagaaaaggggccagtggcactgtaggcaacatcagacaagccacagatctcctgggagatctaagctctccaggaggcagataacaacattttgcctttccacggggttgttaatatacatatgaatcccaaatacaagaatgggctcttcaaactggtttatttaaacactttttctgagacacacgtttcaagaaggggataaagagggtgtgatgtggatcctgtgctgtcttcaaagaagggaaggtggactgctatgtttctagtgtagaatctggcacagaaaccacccatagcaggtgcgccacggacctgctttagctggaaggatcctttctacattccttccaccacctagtgagtggccacgttgatgatgagacctgggcctttaaaaatcctctttcaggtctccagccaaccctctccattcaactcagtttcacaaaccttttcttagcagccacccattcccaaggactgtagtgggtgccgcaggggagacagaggtgaaggagacacagtcctttctgctgattctgcggctgagtcagctgatagcctacgtctatttgccaagaatatgatcaactgagtgaaaacaacaaaataaaaaacgctgagttggggagatgactcgactcgggaggataatgagaatgtccaagctgtgagtcccctggaggccaaggcaagtttgcagctggcatggtaacagcagggtggttgctgagggaaactgaaaccatgtcacatggaaaagatttgtaggagtggagggcctttggcctggagaagaaaagccttggagaacagaaaggctggtttcacatacctgagagactgccatggggaagacccatactttgttctctggggccccagagggggcccaccatagaacaggactatggtggggatacgtagggggaccgattgcagctcgaaattgcgaagtcctgtccttgtcagagctgtcccaggtggagtgggatgtaccaggaggtggtgagttcctgtcattgcagggatttcagtcggggtggagagcccactaaacaaagacgctgtggagaagaaccaagcatggaggagggtggagggcctgatcttctaagcttcactctctgcctgggagtcttcgattcctccctcctcttactataacttaatgagctgctaacgccaacacctggcttcttattcaaacatgcttaaatgtgaacggggaagactggcatcagaggtgggcagattaacaacaaactccctcaggggtctccaaaatgagagagaagggacaaaggcagaatcgttctgcgtgcctgcaagttggatttggagtctccacactgtgcctctggccgttgaacagaagaggggtctctttgctgtgtctttagcaaggtgacaagcaagagagctgggtagcacagcctggggctcacaggcagcagatcaccttcagctccccaggcccctctgtcatggactcaggccactgctgggactcagtcaccaggacagggagagcccagagggcactgctccacagggtgggcacagcaaacagcccttccccacactcccactcttcccggcagagagggtgcctgcggtgtgactcgagggaactcggcctattcatctcacccgcttctgcctatctctccacacacacttttgtcattgttaaaaccatgagcagctttttcctgatatcacagtctaggaaatcgatgcctcgttcagtgagccagcacttgctgtgctcttgccacaggttgggactgtgtggatggatgccccattgcttagggagcacagaggagggacctagctcgggctggggctttacagaaggcttccgagaagggatgtcattggcctgactcttaagaggaaggaaaagaagagcaccaagtacaaatgattagcactactcatcagcaaatcaggagactgggcgtgtagggagatgaggctgaggaagtcactctgaacacacacgaggggcctgattgtcacctgaaatgcctgatgttttcctgttggttatgggaaacagagggatgacatagattgatttatagagatttttctgcctgcatcaaaggcatcataaacaagagggtaggactagtggcaaagaaacgagtcagaattgtttagtcgagacatgagaagaccctgagctagctcagtggtagcagggtggaaaggaagggaccaaaaggagaaatattttggatttaaaaattaacaagactgtccaacaaatagaagatacagagacaaatgattcaataaggcaagggtcaaaagacttgaacaggcacttcacaaaagaagataatgcccaattaagcacatgaaagagtgttcaacattaaatatcagggaaatgcgagttaaaactacagtaagacagcagttcataccccttagaatggctaaaatcaaaacaaatgatcataccaagtgctggtgggaatgtgaggaacctggaactctcatgcactgctggtgggagaggccaatggcagaaactctttgaaggactctgagagtgtcttataagtgtacatctaccctataagcaagcaattccactgctaggtatttgcccaagaaaactatgtttatacagacttgtataagaaaaatatgttcccaataaaattgtaaagaatgtttatggcagtcttattcaaatattgaagaactggcagcaacccagatgtccaccaggaagtacatggataaacaacctatggtatgtccatataatggaatatcactaagcaatagaaaggaacaaactatttatatattcagtgtaacatggatgactggcaaaaccattatgggaagtgaaggaaaccagacccagaatagtacacactgtatgattccatttacatgaaatccaaatgtagacaaacgaatatataatgttagacaccagtttgtgggtttatgtaagtgttttggggtgttaggtggggggttgttgaccagttagaggcatgagggaacttcctcaaagaatagaaatgtc

SEQ ID NO: 673 - DNA, 3929 bp, Homo Sapiens
gtcttctgacacaggcatctcacaacaccagtgcagccggaccgttgtctgatcaaagaaactctagtaacgtggaaattcatgctccgagtagtgacaagccagtgactttttctatagaaagggtacaagactccaatttgaaaatctcaagcagctttatattcaagcaagttcaatccaatctcttcctgactcactgtctcatcaacatgcaaagctctcgaagagaaatcatctcttacttgcctgagggagttctggcagacgttttgaatgtggatgtggaagttctttcctcgtctccatcctgtcaagagccgtggagcaaacagcaggatgaggaagacatggaagacaaaactgataacgcacgtcacctcgctgcagcgggagacagaatgtaacttcaattcagcctctttggggtttgggttctgaccaagtaaatcgggaatgttgttaacatatcaagccagcctttattgtttgtcttaacccaagaaaacacaaaatgacacttactttgttgctcatttaggttttaacttgttgatgtcctccccacaaaaatcaaacttgaaaatgcctggcagggacccctgagatctagggtttgaaatgctcttttgacaagttaagaggttaaaaagaattcaggaacatactgtagagtctcatgggggattttagaaaaaaaatatgcaaagcatctttaaatatgtggaaaatccttaggagtgaaattgcactgaagtcagattgttttcctattgaggttgcattgctcggctgcaagaggtggggtgggcacatcgtggggggagagcagaagtgcctgttagggtgctgccagacctcagtgtggaattctgcttctcacagttggccataatcaatcaatcagactctctctttctcctcccttctccctctccctttctttccgtggttgaagggcccctcttaaatcgctcttgagcctgcattctaatttgctctctctcccacgtgaaatccacttctcccagctaagctgcgttttgcagctttatgacggtactgaaagcactttatttccacttaaagagctgcctgttctatttaccatcactctcggggtacttaacctcatttaaaaggctaacttttctcctgcattataaagttgctcgggagtctcaaagcctctttctctgcccagcccgcagccagccctctccagccaccccagcctcgccctcacccctcccagcctctgttccaaggcccaggcgcgcccgcgtggggcacgtgtccctgaacgccccgcctccggccagcctgaccgctcagtgctcggtgtcacttctggcacgtctccacattcctcaaatcccagagaggacctcgaaataggatagaaaacaagaatttaaataagaagcaacagggctgcccgctctggctggggagggcctcggcccccgcctgcacctgcggcccttgtttcttgcgcggttttgcaacgtcagagccgtccacactcgcaggccatttttagcggcctgttggaaagggaagacgatgaagtcgggctaagcagggcaacgccttgccctctgagaggcgtggagggcccttgggaagctcagagagctacgataaaatggctaaacgaccttcctctcctccaagtcaccaaatacgaggcaggagaggtgcccgatgagctcccagtcatgtggttcagggcgggctctggaagactcacagaggagactcctccgagaaaccaagaaggtttctgtccaagtcgggatctgctctgctcaggatgctcctccaacacacacagtgaaaaactgagcacctagagagcaacaccaaaaacccatggccaataatggagagccaaatcaggagagcattcagcaaagcaattcttgctgtagaaggaacagcacaaaaagctggaaggaaactgaggcatgcgtgaaagataacttgtcagtgtttgcagtctactgagatccccgctgcaagaaaaggcaggatttccacttgcttcttggcccgcctctgttgtccagaatccaggacaggtgacaagagaagcagatgtgatctgcacaagctggctcagctgggttgggagttgctcttcctggacaggccgggaagggtgctggaggggagggaggaggagagaggttttaggggaggggtgctgagcagtcaggtaggttttctgtgtgtgagaagaaatgcttgaacatggaaatgaaaagttctaactgtaggatggagtttacaggctcaactctaagctttcagaaagcatctcttgaaaataaaatcttggatgttgtagcaagtgctgtgtacatgctcttcagctcctagccccatcctactactgtgaaagtgcatgcctgtaaactgccaccctccagcatctttttctggccattagagcctgattttcctgaagattcagcaggttggaatgccagagaagtaatgccctacctgcacccagcagtgttccaccagtggctatgggagtggctcacacactccagctaccttccttcatgggactggaacctggagttcccaagagggattaggctctagttgtccatggggcagctgttttactgtcaccttccctgtcctgtctctcttcctgtctccactccctacagtgctcccagagataacttcccaaatttgctgcctgcccttggatgttattttagggttggcttctgaaggaacataaacgaagacagacagatgtgctgggtagctatgtgtaagatcacactgaaacatagccaagaacaaggcactcagccactcccaggtttaaaatcaagtttcctactttgtctctctggtctgaatctgagtgaaagcccaggctcctgcgtcacctgggccacctaaggatctccctccagcctctgggtgctgaagctccacctgccctcaccacatcacaggaaaccgcgagcacatcctcctgccttctccagcagtctcttcagtgagcgcctgcagaactgcatctagagcaccgggccaatattgtcaccttccctgtcatggcttccttcctgtctccactccctacagtactcctgagagccgggagcactccctggagcactccctgattcgttttatcttctgcacaactgtttggctggaataggaagcaaatggcatggaatttgcatatgaaaagccattcccacctgtgtccttgtgtctgtaaggataggaggatccaatcttcttatctgaccagccctgtcaacaccttcatcttgtttcacatttgtgaaggtcggggaggcatctggagcttcttgatgtgtcagctcggaatgctgcctgtgggctgggtcggcttcaggcctgcaggtcaagagagaagcacagacaaaggcaccacagagatgcacagtgacactcaaagaggcagcgagacagagatgaaggcgtcgtgctgtgagagccatcgcccggcagcatcccctctcctgggtgtgaattatgtcctccaagggcctcagccactgcagcttgaaagttacttttatgctatttccttaaaaccaacaagaacacttgacatttctaggaggctttgagtagagaacactggtggttctcgttggttgtgtaactctgccaggaatttagaatattgttagaatctttattacatttcagcctgataaggagatgaaatagctaatgaatccactaaaaaaactgccaagtagcaaagctggaaactttggcctttggttgtcgtataataacacaccccaggcacagaaggtttagcacatttttccttactaaaacacaaaacaacaacaccaataacccaatgaggagtcttcaactcctcccaccccatagccctgggc

SEQ ID NO: 674 - DNA, 1623 bp, Homo Sapiens
ccctgtgaagaggtgccttccaccatgattctaggtgtcctgtggcttccccagtcacttggaactacaatagctgaagaatgtgagaaagaaaaatcaaaagcacacaaatgagactgtgcagtgaagaggccacagagacaaccatactgtctttttgtatcacaataagcaaaaataccaaggaaagaggtttattgagcacgtggttctctaggctgggaagttcaagactggacagctgcatctggaagcttctggtaaaggctttgtacagtatgaaaatatagagaaacagaaggggaagcaggtgttgttaagagaccagacatgagagacagcctcattttataacagccagggtaactaaatcagtctgaggagagcaagaatttactcttggaaaaaagacattaacttctcttaacgatctaatcttaaggcacaatgtctcaacaatgtctcacttgggaacaagcatcaacgtgagttttgatgggaacaaaccatcttcaaattatagcagtttacttttcactctattaattgtgttctttgatgaatgaaagtttttgattttgatcaaggccaatttatctatttcttcttttttgttatctgtactttttatgtcatacctgtaaaatcattgccaaactcaatgccatgaattcttttatccatattttctcctaagagttttatattttagctcttatgtttaagtctttgatacattttgagttaaattttgtacatggtgtaatataaatatccaacttttgcatgtagatatattttcccaagcaaaattgttgaaaagactgttcttttcccatcgaataattttggcacacctgtaaaaaataactggattatgaattcaggggttgatttctggactgcctattactgccaattagtatttatgcctgtaccacactgttttgattactgtagctttgtaataacttctgaaattaaggagcataagacctacaagtgtgttttttctcaagattgttttggctattcaggtcccttgagattccatgtaaactttaggatgtatttttctatttctgcaaaaaacatcattgaaatttttatagggattttcactaaatctatggatcattttatgtagtattgacattttaacattattctaatcagtgaaaatggatttccatttatttatgtcttctttaatttctgtcagcttcattttatagtttttagtgtacatgtctttagcctgcttggttacatttatttctaagtaaatgaaattgttttttatatttccttttcagattgttcattattagtgaacaatgatatgcagctaaatttcatgtgttgattttgtattctgcaacattgctgaatttaaattagaactgagccctattagttttttgccacatttttaggattttctgtgtgtaagatcatgtcttttaaaagaaataattttagttttatttttccaatttcaatgtatttcatttatttatttgttgcctaatttccctggtgaggagtctattaaatagagggatgaaagtgggtatccttacattgtttgattctaagtttctttttaaattataaacacag

SEQ ID NO: 675 - DNA, 3965 bp, Homo Sapiens
cttcctgccatgtggtgacagattaaaagctgctatacactttggaactggaaactgagctcccaatataaaggagataagccatcatgcttacaatatgttgtgcagagctcactggtgggcagtttttcttaacaatgcatcaggacttttgctatttgtaaaggaagcttaaaggaagctgagagtgctgagggcacatctgaaaccactggaggttggcgacgtggaggtcaggtagtagtgctctcccaccaggagtccctctgcacccctggagagagcagtcattatgcaggacaacccatctgctcagaactttcagtggcgacttgtggtgtgactctgttcccattcatctatgtgctgctgtaggcttagcttcccacagcctccccagctttgccatttgtcattatcatttactcttaatatttattctatctatgaccctgatgcacagagtgatagctgatagtctcttaaaacaacgtttacaattattttgacagtttaccgtgttttgttctctcaacaatacttagaatttgtctgagttatagttgcatagacggcaattttcctgacctagttttctgactatgatttatgggtcagtaaactccttaaatgatggaatataacatctcaggccacagggaacacttactatcacatgctcactgttgcaggacggatgcgtggccagcctcaggttgctaaatgttagggtgatctgccttccttctggggcggtgattctccacttgtagatccggccatgaggatttaggttcgggtagttgggagaagtagatgttccagcagagccctgaagatccccaccacactctgatgtgggggaagaaagccaagaaaacttccaatcaaatcaaaatgtctccttccatcaggaaagctctcaaaattcaggtgtcctgcgtgtacaaagaaaataataaaaaacaagaccttgcccatgaagaaatattaatctctctcaagaaaacaggaaaacatgaatgaaaattaacatattcaaatatatgaagaagtgaaaaaaatgcaaccagttaggggaaggatatctcaggataatgaggaaggccagttttttggttgaaaaagtggtttgagacaacagagtgacaaatatctgccttatgctactgccaggagacatgcatgaccctctttctgcctcaagctatagaacacccctcaaataacggcatctggcaatgggatgtctcagcagcaacaggttgccttcccactaccgttgctctccccaggtggcctccagggtaggctatatgacacctgggctctggacatccattgttaatggtagaattgaggtagagaatcactggtactgcccaaagcccattaatctgcacttctttgcagagtatagacatgctttgcctttcttggaagtgaagaaacttcagaggctgaataagtacatgcgaaaataaacaccccaaagagagcagatatatttcactaaccagaagtatgatagtcccaggtctccacaaagtctttttcacagccagaggaattctgaaggttaaaatcttcaaaagagatggtgagatagtgtctggagagcccctggagatgccaatcacagaataagttgtctctatatggaagcattagatggccaatgctttcaacaacaccactttgccctgttactcttcccccacactgagctgaaaaaaaaaagaaagaaagaaagaaaagaaagaaaggattctattacaaactgtgtttttttcatttcaccagcacatgtgaaaacttttaggtgccaagtgactatgaattgaagtttttaaaattctgaaaatgcttagtgctttcctcattatttgaattctagggttgatgtaaacagaagtgataccacaagtccaatccaataatgggaaacaagatgacgaccaaatggcacattctgtaatgtcacattaattcttttgggacactatgtaagagctatcagttgcaagcaagtttcatctcaagaacaaactggtagactcatctgacctgcctagaaccttgtgttgattctaaagactgaacccaagctcacctggaaggggggacacctgctatatctagttttactatcaactaaactttcactactgtaactgatatctcagggccttgaaaattactattcaattatgtcttattagctggatgtggtagctaattgaattatatgcagcttgacccgggatataatatgatctatggtgtagttaaatactgttacaactagcctttctgaacttttgctatattaaatatttgtttggtttgtgtctagacctatcagatactaaattgtgtgctattgtgaccatactatagtgaatcttcaacaagcaaagttactgctcaatttttaagtaaggaaatcaaaatcctgaagagacatatttgctttttatccagtgactgatttggcactagagactcagagaaaaaaaaaaagcttaatcattttatatatgatgaggaattcaaagacattgttctaaatatagttatctggttcttaaatagttgtattacttaaagtaataaacatactgtagttcttccttttccttggcggatacattccaagtccccccagtgagtgcctaaaaccttggatagtaccaaaccctatatagacatatagacaatttttttctacatatatgtacctatgataaagcttgctttatcaattaaacgtagtaagagattaactaataataaaatagaacaatcataacaatatactgtaagaaaagttatgtaaatgtggtctctcaaaatatcttggtgtactgtactcacctattttttgggcctctgtttaccaagtgcattgaaaccatggaacatgaaaccatggataagagagaactactgaatttcatagtaagcagaagaaacaggagtttgatttaactacacatatttcttcacaaataagttagaaaaaatataaaatattcaagtttactaagattacattttaaaataaaaattaaaagagaaattaaagttgatgactgtggttttaaacatttacactccttacttatttatagcattaaaatatttttaaaattatgcagatagaatgacttctttttaaaaagtcatggttttaaaaaaagttttaacatattcatcctgtaataactcttttatttaatataaaaatgttttccagggtttttatagttttgtgttttacagttaagtcttcaatctatcttgaattgatttttgtatatggtataaggaaggggtccagtttcaatcttccgcatattgctagccagttctcccagcatcatttattggatagggagtcttttccccattgcttgcttttgtcagctttgttgaagatcagatgcctgtaagtgtgaggccctatttctaagctctctattccattttattggtctatgtgtctatttttgtaccagtaccatgctgttttggttactgtacccctgtagtatagtttcaagtcaggtattgtgatgcctccagctttgttcttttagtttaggattgccttggttatttgggttctttctggggtccatatgagttttaaaatagttttttctagtactgtgaagaatgtcatggtagtttgataggaatagcattgaatatgtaaatttggggaagcagtatgaccactttaataatactgattcttcctatctatgagcatggaattttttttcatttgatagggtggagggtgggagaagggagaggggcagaaaaaatagctattagatactaggcttagtacctgagtgatgaaataatctttataatgacccccatggcacgagtttacctatataacaaacctgcacatgtaaccctgaacctaaaataaaagttaaaaaata

SEQ ID NO: 676 - DNA, 7985 bp, Homo Sapiens
gcacacacgcacgcacacacactcgcacacacgcagaggcacgggagggaaagaagccgatgaataattttgctattttttaaaatactggccgccatcatcaagcagcgagcagcagcagaagcgttgaagggagaggaggcatcgggacaggcccctcttaggagaggatttatatctagttggaaaaaaaaagaaagaaaagaaaaagaagaaaaagaagaaaaaaattgtcaagcccccgaactgaaggttacgagcggcccgtcagcagcccacatgtaaccgaactgtcgtgtttcatggctttttgccactccagctgtcaatcaaagcccggaatgtcaaggtagtgaatgaatgatggttgatgatgatgaagaggaggaatctttcagacccgtttttttcttccagtaaaactccgcgaggggtttctgcttcttgaattttttcctcccccctccccccttttttagctttgcccccgcggtatctataatacgatcctctctctttaaagtattgttcaaagaaagcagtgagaaaaatcaagaaaaaaaaatgaatagtttgcaaaaattggacttcctccccccctttcctggaccagaagagaccagcttaactcagagcacactccctccaagcggtgcggacaaggggccaccccgagagtctttgggggccgcggcggaatcgggagggaggaaaactccaagattaaaagtatccttatttgttgctgagttgctcgtcgacatttaagagaaggtgagtaaaaaagaaaagaagatgaaagagaaaagaaaaagttggtctccagaattttatttcaatcgacagttacgcgaattcagtttagccgggaccgggaggtttgagagtgcggcggggtggggaggggaaaaaaacaaaaacgctgcggagcgttttcgactttgcaaagctgttgatgttggtgggtccaagttcccggtgcagcgccgctggctgagaaatttgtactcagtttttactcttctaattattcttaaattcaatttaagaatttaagtttatcgtcgccaataggattattgttgttttaaatgtcttgttcaataagtgccagttacgtttctttttaaaagaaattcctcagtgtccttgataaacctttttttgtaaagatcaacttcatgcggaacctctgccttgcagggtttaaacattcaacattgctaccttctgtttctttttctgtttttatagtgatactgtaaagtgagttagcatctctatagctttcatttagaaaaacttaagtcgcatttttagaaaaatattccttcccttgcagtgtgagtaaaaacaactcagacagattgatgatttctatattttcttttctttctttatcttctttttctttttttcttttcttttctttttttttctttttttttgagacggagtctcgctttgtcgcccaggctggagtgcaatggcgcgatctcggctcactgcaacctccgcctcccgggttcaagcgattctcctgcctcagcctcttgagtagctgggattacaggggcgcgccaccacgcccggctaattttttgtgtctttaatagagacgggggtttcaccatattggccaggctggtctcgaactcctgacctcctgatccacccgccgcggcctctcaaagtgctcgaattacaggcgtgagccatcgcacccggccgatttctatgttttcaaacaattgtaagctaataatgagttgattatctggtgataatcttgggttttacaaaaaaagaaaagtttaaactttattttcatgtgtttttatcagatgcagaaggcatttttaaccttaacgcctttctctgtctctctctttcatattcttaacttcttttgcattttattgaatacattaaagcaaacaacaggaacaatatggttaggtgtaggagggagagagaaatatgacattttaagatattgtcaaaaagtcatatttaacttcaacgacttttagttaaaaaagtgtgagagtgttgaaagtgcattcctactggaggaaatctatgtctttttaaaatttgccagttgtctcaggggagaacccagaatttctttgaacgaaagagatcttactgatctagttgcatgtcacttatgaaactgttagtttaaaatagcagtcctagtgtagtggattacacatgaggagatcaagttggagtcgattcaaggtattggttcttggtcagtctgctgaattcaaaacactattacctttaatcagcaacttgcgggtgttttattaatagagctgaaaaaggctcatctaacatataagaatttcctggtttccctcatccccaattttccagtccaatagaagcgattccaaaggagtagggtacccgcacttactgatttccatcctggtggcattttgctaatgccccattgtcagcgttggcactcccacccaggcttccaggctcatctgctctcccatatttggggtgaaaggaaagtaggtggggcaggcccgggagacaggcacgaaatgggggtcgcaggaggtggcacacacctccgtcaacagtcagctccttctgcccaggctggaaatggttttaacaggcggtaaaatttcatcttgcggtgtcaaattggggtcattttggggttagagttctcagtgtccgagaggagctgtccagctgcgtggggactcattaactgcaaaagatctgtttcagtaaaaacaattcaaagacaatcagaaggctaaagaccctctacaaatcgcattttacaagtgccccagaacaaatatggatggtgaaacctatttcttcagaatcccaaatcagctacttagctctggagtgggggtgggggtactgcataaaaaagaggtgaaaaggaggggaccaagcgggtggggaccagtggaagggggaatcgggcctctcaaatttaagagtctgtttttaatcacctctttcttattgaagcagccccaagagttctgaaaactgctacttttctatttttcattttctttttttgagccaacatggaatgctattataggtaacatttaagatttaaaaggaataattgaattccactatagtcccttaatttgaagggcattggctttatggggagtgtttaatttgaaccaagaatttatgaacccagactctaggtgaatttgcccacactccttaaggagcttgtgtagctgtttctttttcttttccttgaaagttatagcttcttagcacagataacttcaaattcctcagaactgagaagtccaaagtgttaatctgtgtattaaaatcgccaggtttaaatcctttttgtcttcttacaacagttagaacaattgacgccttgctagagaagcaaataagtccaaccttaatcttatctgtaactttatttaatgttttgatttggaatattttggattaagcatatctttaaaaactctgtaaggttaatttttattccgggagggaagttctctttactgattttgaaaaaagacatgaattattactttgattttcaaaaattccttcaggtaaaaggaaaattcaggtttaaaatgagaagctagatatgtgaaatgccagagattttaggataaaaccaagtcaatacttaaaagtaaagtatcatttgaaagaaattttatttcttgcattactgaactgagcaagtaacagtgatcaaaaatatgttattctctctccatctctctctctctctggactccacttctgtcactaggtcttctctttccatccccagcacttttctttgggttctgaatgacacagtgattttttttttttgtagtctagttattttctccaagcgtctcagagtatttctaaattgttattcaaggagtttgatttcagccctgcagaaacagccctgagcccagcatcgctgggacaaaggcagaaggggctatcttctgttcaagacctgctggctgacagttggaatttttgatatatattttatttggcgtttccaataacgtgtttgtctttccctctccaccccttgcagccatctattacttttaaaacatcccttctccataaacatcggctcatccttgtgaactattcttgaccttcccagcagtgtaaccagcagctctgaaagttggcctagaaataattccactggcttccttacctgttaactttactcactcttcctagctgggatcaacagaaggaaggggacttttttgtttgcttttgttgttgttggtggtggtggtggtggtggtggtggtttttggttctttggtccttttcccacttaaactttctataatgatttattctccgcctcctcccattaataacgtttaagcaccccacactttattttttaaataaaatggagtaaaattattatacttttttcctttatgcccccttttcttttatttctcccaattttaggggcttcaccatctcatagaaaggacttcaataaatagccctctagcgctatctggcggggctccaaacacgacgtgcgcttgctctcactgtttcttcctccttcccgcgctctcttctttcctctctttcttcctctctcctgctttttctctcgtctcttccgctcgattgttttcctctttttttctgtcctcctgcggcctcttgtctagttcctacccctacttcagcgcaggcggcttggaaagccccggccagaggctagtaactctcgcaagtgggagatgctctggcgacggatctctcttttctgatccctcctcccccttacccagcgcggatcacacacatcctttgcctttgattagcatcttaaagttgcttagcgtgccgcttaagtcccagcgtctcagctggcggtggtttggagaggcttaaaactgcattcatgaagtttggaggaaagaaatcagacactggaattcagggctaggagcccagctcagttttaggtcagaaggccgagtctcagtgcgagattgaggaagggtcggggcttaacgggggaggtgggggtggcgggggggggaacagcacggcgcggcgcctagcctgcgagatggagtcggagtgggggtgcgagcggtcctccaccgcctctgcccgatccgtacctcacaatggactgctcgagtttgtatctaggcctgtccaggattgtttactccttcaattaatcagctttatctcttttccccctccccccacctccaccaaatctggagaggagtgggaaagaactggaaaactcacagggcaaagagagaaagccaacagtcatagtgcgggaggaggcacgcctgggatgcaatacccaacagtctcctccctgctttcctgcaatttgcaggtcattgtctttcttatttgtagctttttttttttttcttcagtagccggtaaacaatcgaacgccgggtagggaggtcagaggggatggggctgtgggagagattctactcaggctaggtgctttagatttggacctggctgtgtccctactttattaaaattctcatgtggcgcgcgctgtcttctctcttctctctctctctctctcacacacacacgcacatacacacacagcccgagagaaatttccaatctttgagcaaatctcttccatctagtccttgaaacagaggaaaggacatgggacctgaaggagagttatgattgaattttctaaaatttagttttgacattgcaaagtaaaagtgaggaccgtattcccaatacagacccagagggtggttatttcaggtgaggggacctcagcctgtgacgtctatgatcaaccagacaaagaccccttcctaaatctgaagtcccacccccacccgtggcaaacatggaatacaagggaggggaaggatggcacaatagtgggttctgttttccaagaactgccccccacctccattgcagaaggaaaaaaaagcacggttcgggtgtaattaattggggactgttattaggtcatcattagccaaggtacaaataatagcagcacatttttacttaaaattgaccagccccagagtgatagatcgatttggagtataaaaagatgtatcaaaacatcaatgtcgattatttgaaatattgtagtcgaattttttttattgcttcatcggttaagtgtctgaaaatgcagtgttcaaacatatatttatgttgtcaatactgtcagaactgtcagttttactatactggatttgtactatatttcaaatatgctaatttacataaaatgcccaccctaggattccccccctacacccaccccatctctggaaaatccgtgtcagtttcttcaaaggattcagcaatctttgcctaagctaaagtgtgcactacctcttttactcaattttccacatcggattacatgtctttttcaccatctctaactttcaaagagatccttcttcctttctccccaattctgcctactctaacctcttcttcaaaatagtactgaggcacttggaaagcttcgaatttaaatatccacatcccagctccaaatataccattggagtaaaaaaacggaaaaactggacttgagtgtacttggccgcactcgggtaaaccaggcttcaccaggtagacgttctcataccgtaagggtccatcatcaaattacctggcagattgaaatcttccagggaaaatgaatttggaaatgtaaacaccttttctttctttttacttaaaagcctcgatggtagaaaaagaaataatacttataaatgatcggcacgttttaactttaaaagcttttgaactcaagtgaaagacacacgttggaaacagaattgatagttttaattctacccattttcacctggcacatcagatcagtggcaatcatttattttatggggtgtggaggggaaagggatagaaagcggatagaaagctagaatccactgaagtccctgtcctaaaaatctcagagaaattaaagacttattgaaacacaaacattccatcgctccatactctccgtccagatgaattgaaacttataaatccacgctctccccaattttatgttttttatttattttttttcagggtttgataggaaagatacccaagtctgatagggaagacagggccacttctggactagctgtgaggatgtgttttcatttccataacactgaagcactttctgtaaaccttttgatgtacttaaataagtctatttggacatttaaagaagctacacatacaaacatagcttggctttttgccgtcaatcccagcattaaaaaaacattcataatctaactgagaagctctttcatacccatccttctttcaaataagtaaataaataaagaaatagaagtgcaaaccaaagaaagtttccagcgtgcatctgtacgtcttcgtgtgcgagtttataaacaacttccagtcggtacttgggtgttacctccctcctgccacacaccccaaggcagaggcatcgagggatcgcccccagagagctgtgtttacttagcttgttttaaaaaaaatctcgccgccatgtatgacaagtgttactgcaagaaattcatcagccttctacagatacttccagttttgctgtaatgatctgcagaagagaactgccatcactttctcacatcccaaggtgttgcaggaactcagagagaggggagagtggctgaaacgcttaattaccggaggcgaaggaggggcgcgcgggggaccgaaggagaggggagtgaagaaggaaggtcctttaccaggcttgtacctggagaaagctttgaatcgcttctctgctatatttggaaaaggtatgcttgctttttaaaaaaatgcctttagggcaaagtgatacccttgtgtaataattaactcagacaataaaaataattgga

SEQ ID NO: 677 - DNA, 1903 bp, Homo Sapiens
attgaacatttaatattttggatgtaacttttgaagaaagtatgctttggtgcttaaaattgtatatgattttaggtaagaaactttgataatattggcataatttagatttattttctttcttttttttgagacagtctcactcagtcgcccaggctgaagtgcagtgacacagtctcagctcactgcaacgtctgcctcccagattgaagtgactctcgtgcctctgccacagagtagctgggattacaggcatgcaccaccacacaccgctaattttttgtatttttagtagagacagagtttcaccatgttggccaggctgcgaactcctgagctcaagtgatcctcccacctcagcttcccaaagtgctagcattacaggcatgagccaccacacctcaccagatttttaaaaaatatataactgcatctctcttgattctggggcttggtaaaaatggatagataagatagtattctaaattcaaattcgtggctaggcacagtggcccacacctgtaatcccagcactttgggattccaagacagaagactcacttgagtacagtatgagaccagcctgggcaacatagatcttgcctctacaaaaaaaaaaaaaaatagccaggtgtggcacatgcctgtagtctcagctgcttggaaggctgaaatgagaggatctcttgagcccaggaggtctaggccagagtgagctgtgatcgtgccattgcactccagactgagtgacagagtgagactgtgtctaaaaaaaaagtttgaattaaaaaaaaaaaaaaaaaagtcggctgtgcacggtggctcatgcctgtgatcccagcactttcggaggccaaagtgggtggattacctgaggtcaggagtttgagaccagcctgaccaacatggtaaaactccatctctactaaaaatacaaaaattagcctggaatagtggcgcatgcctgtaatcccagctacttgtgaggctgaggcaggagaatcccttgaacccagaaggcagaggttgcagtgagctgagattgtgccattgcactccagcctgggcaacatgagcgaaactccatctcaaaaaaacaaaaacaaaaaacaaactcaaattagcatgatagatcaggctacttagattcagctttctgagatgttatttgttaacattaaggctaatttattataatgaaaatgtaaactttgaggtatgttaatatataaacatctttttcctttggcctaaaaggtctttagtattcagcacactgggtaaagttcagtttagacacaatcaaattggcatcttttaaacataagtgaaatatagagagcttgaacttgagttacttaaagaagatacagtataattaattatacagaacaaaacaaagatgtgtttagagtgactctggcctgactcttgtccatcagcccctagtagcctatcttcagcctttgggaagtcttaacttcccaggttaaactagaatattctggaactgagctgtccaaatttcatcttaaagtggatcatttgactctgaaacacgattctcatggcagaaaaagccctggtgtttccttggagctggggataaaggccagtgagccagcctgtgatgagagctgcccctggcactatctgagtggaaagctcattgggacagccatgcagctatcagagccgactgaagccctgtcccttacccctcaggcacctgatgcttaacttgcctcctgggaaataatgatctagcatttacttggaacaatgattaatcatgttctttaataattgctgacatttgtattttaagctgtataccaatgttcgtatttgacattgattttctaaccattagagatatttaattaaaacttggaaatgaaag

SEQ ID NO: 678 - DNA, 2018 bp, Homo Sapiens
ctgtgccaacttgtttcaccatgttaaactgcatacatacccatgaactatttatttacaatacatttgatctcgttaagaccccagttctatttccaaggcatgcagcccaaaaccaaaaagttaaaagatgataacactctgtggttgaattacctatggaaaagaatgaaggcagttcactctgtttaagatgtggagaatttcctacaaatagttaaggtgaaataaaatcattaatagagagtaggttccttccatttgagtaagtgatctagaatatgggataccacggttctttttagagcattttcagtgtagcctcattaacttctccaatttaatacgacatacatacttcttccacctgaacataaaattcaagaataggagcatcctacatctttcattctttccaaacattacctctttagtaaattcgggttgctataacaaaataccatggactgggtgactaaacaacagtcacttgtgtctcaagttctggaggctaggaagtctaagattagggtggggcagaataaattattggtgaggatctgcttcctgatttgcatgttggagaaagggctctggcctcttcctcttctaataactacaataatttcatcatgggggccccaccctcataatctcatctaaacctaattacttcccaagcgccccaacttcaagcaccatcacactgggggttagggcttcaacatatgaatttggggggggatataaaaatttagtttatagcactcattttcaggtcaaagagcccacttccctaatcacatacttcaataactagttaggtaattattgttttactcttttgtagattagatcagagacattaggtaacttgtccaggacacacaacatgcatttttaattaaattggatttaataacccttgaactttccatttatatcatgcttatctccagaataggatctctcctaaggaggcagagtgatttaaacaaacatgtgctgcttcaatctcctttactcctaaacttccattgatattgctagggacaaaaaattaagcaatgatctattttaggaaatcaaaatactgttcattgaaaagcagttttaaaacaattattgacatttaataaatacagaattttcagagggcatctcttctatttcaaggttacctcccagaaaaactgacattctaattttcttctcttgaaagcaattagaaaaaatgctaagaaatgattttatattttttaaagtagagggccaatgaagtgtctaacaaaaggaaagcatacagtaaatgaaaaataaactagttatcagattgtcttatatctttccttcataggacattgatacagacatcatcaaattcctgtttgtattgccttatacatacttaaaaaacaagatatttacaaaaatattttagatattcctgtctaggaactaaaattacagctgatttagaatttgcttaattattcagaaggaattgaagtgaaatgaggaatacaaatttacttgtcctaaatttttaaataaaatgtattatattttgtagtcaattatatataccaaaataatgtctgaataagacgtaatcctgtcatgagttctctcttccaaaaaagaatgcaagagaattgattatcttagttagaccccatttttaaggaaaaaatacaccctgtatgatacattcttagatatatgggtttgagattattaacattgataatagtttttttaattcatcatctctaaaactctaaaactttagtgagaaagataataaatagaaaattaccctggaaattaaaatttttagcaatattgaatacagtagtataattttttgtggctcttgatttcctaagaaaaatagtgatttttatttaatgaaaatttctcaatttggttaatattctaagaaaagattgatatatttaagcatggtgattagaaaaatatgcatatttcctgctcataataaattttaaaacaac

SEQ ID NO: 679 - DNA, 9590 bp, Homo Sapiens
agagggcagcaaccgacttgtgcgaaaggagggaacgtgtgggtctgccagggtcctgcaggggggatgagaccctcgctccgctccggcgatcccttcgctctccaccctcggccagcccctcctgtcctccatcaggcctcgctgaggatacctcctgggttccaaagcgcgagttgaacctgagcttgacattcattccgtctcgtacaaaagccatgcctgcggggagagggagaaaatttcctacaggagcctcaagactgcgtttcaggaagccctaggacccactgatcctgcagctgcgcctctcactcgcctcaggtttggattaattgtcactttctgttaagctgacatttatggagggcctagtgcgtcctgggtgctgcgctatttaggctgttgcacagaggagtggccaactccagcaaggctcttgctttgctgcttccccattcttcctccgcctgtaatccagacaaaagcccacattgtaaccaatccaggggcagcttagcagtgccaagcaggcagctcagaggccactggtaggacagggcatgatcaacaggcctcctgatattttctaacatacgtattaacaagaaagaggaaattaaaaaacgaagatggacaacagaacttcactctgacttgagtgacttttatcctcatttggataatagttttcaaaaattatttgtgagtgtatatgtgctattcacaaagcaatggctactgacccaacacgtatttacatctcttcttcattattgcatttcactccgtaaatgtcttagcctagacaatcaacaaagccataaaccaaatcctgatttgtagcatttgctgacttctgtgtttaaattacccatcataggcgattttaagttacaatatgtagtcgttgaatacagatttggagagagtcacaattgcacactcttttatatttttccacctaaaaggtacaatagacataaataactctaagaacacagataacagcaaaatgtagcaactaattaggaagaaatgaattttgtgtctccattacttttccagtaaaattcatctaacaagtgtattacaaacaagtgtatgcaattgaattttaactcaaaattttagaatttgaacaattgatgctagttagggtgtgagctagctccagcacataatcctgtcccgtgaagagaagttttatggcttacatttttagatatatctaagtttactggaactcaaatacagaacaaaatcccaccaaaattaacatatactgtcatatataaatatatacacttttatatgtgtacatatatatgtgtatacacactttaatatatgtatatatgtatatatactttatgtatatgttttacatatatttttaatatatgcatgtatctgtatatatacttttaattaacagtcatgttacagagggcctactctgacagaaatgtacatctctcagaatcattatcatccagtgcaagtgtcagctaactactgccaataggctagatatctctagcttgccacctggttttgtactgccagagagctatgtatggattttacacatttatactgtaaagaccattatcttttccacatgaacagttgcttgaagagttgagggtattggcagtagcaacaacagacaactaaagaacaaagcaaatatccagtatgtttagatgagttggcagcaatgctgttatttccttgaggagttaatgttgagtttgaagtcactaaagaatcatctcctatgaatagtctgctgggaacaactatacatgagaatatttttaaagaagttgagaaaatatgaattcattacaacctgaagtacaatctgctaagatctctttcaattgaatctgagacagtatgtggaacagaaaaagtctaatttgaaaaaatttacaaagcttgtgaaaatatacgttgtttatttatttattcattttattattcatcagcagtactttgcataaaacattttaatctatcatttgttatttaaaccagcattgtcattgctgaactacattcactctggtgaacagttcagacaactagaaatgaaagatgaataccctgagcttgtcctactgcatggcagtttgatgggttaggactcaatttttttgaaatttttgagcttaaggaagagatcaaaatatttttctgtatgaaaagaatttcccttggcctgtactaacaaccactgaatgactttggaaattagcttttgctacagacttgataatgcttcttatatctttctttcttttttttttttttttttgagatggaatctcgctctgtcacccaggctggagtacagtgactcgatctcagctcactgcaacctccacctcctggattcaagtgattctcctgcctcagcctcctgagtagctgcgattacaggcacgtgccaccacgcccagctaatttttgtatttttagtagagatggtgtttcaccgtgttggtcaggctggtctcaaactcctgacctcgtgatccgcccgcctcggcctcccaaagtgctgggattataggcatgagccaccatgcccggccttgataatgtttcttaatgaattcaacctgtatatatacaaggcaagatggtgcttatatatggaagttatactgcaatatatcctttagataacgaatgttatataaatccctagtaatgttgagttgatctgtaaatttcttatgttggaaaaagtgaaaacaaaatgaactccattcccacactatttgaagcatctataatttcccagatcaagctacagcttcaattacatttttctcatctttaggaaaggacagaggaaattctgatatctcagaatctgtttaattttccaattgagaagctgccacctaacttttcttttctttttttttattttatttttcacagagtatcttttttttattattatactttaagttttagggtacatgtgtacaacgtgcaggtttgttacatatgtatacatgtgccatgttggtgtgctgcacccattaactcgtcatttaacgttaggtatatctcctaatgatatccctccccgctccccccaccccacaacaggccctggtgtgtgatgttccccttcctgtgtccatgtgttctcattgttcaattcccacctatgagtgagaacatgtggtgtttggttttttgtccttgcaatagtttgttgagaataatggttcccagcttcatccacatccctacaaacgacatgatctcatcattttttatggctgcatagtattccatggtgtatatgtgccacattttcttaatccagtctatcattgttggacatttgggttggttccaagtctttgctattgtgaatagtgccacaataaacatatgtgtgcatgtgtctttatagcagcatgatttacaatcctttgggtatatacccagtaatgggatgcctggggcaaatggtatttctagttctggatccctgaggaatcgccacaccgacttccacaatggttgaactagttgacagtcccaccaacagtgtaaaagtgttcctatttctccacatcctctccagcacctgttctttcctgacttttaaatgatcaccattctaactgctgtgagatggtatctcactgtggttttgatttgcatttctctgatggccagtgatgatgagcattttttcatgtgtcttttagctgcataaatgtcttctcctgagaaatgtctgttcatatcctttgcccacttgttggtggggttgtttttttcttgtaaatttgtttgagttcattgtagattctggatattagccctttgtcagatgagtagactgcaaaaattttctcccattctgtaggttgcctgttcactctgatggtagtttcttttgctgtgtagaagtctttagtttaattagatcccatttgtcaattttggcttttgctgccattgcttttggtgttttagacatgaagtccttgcccatgcctatgtcctgaatggtattgcctaggttttcttctaggatttttatggttttaggtctaacatttaagtctttaatccatcttgaattcatttttgtataaggtgtaaggaagagatccagtttcagctttctacatatggctagccagttttcccagcaccatttattaaatagggaatcctttccccatttcttgtttttgtcaggtttgtcaaagatcagatagttgtagatatctggcattacttctgagggctctgttctgttccattggtctatatctctgttttggtaccagtaccatgctgttttggttactctagccttgtagtatagtttgaagtcaggtagcgtgatacctccagctttgttcttttggcttaggattgacttggcaatgtcggctctctcttggttccatataaactttaaagtattttttttcaattctgtgaagaaagtcattggtagctcgatggggatggcattgaatctataaattatcttgggcagtatggccattttcatgatattgattcttcttacccatgagcatggaatgttcttccatttgtttgtatcctcttttatttcattgagcagtggtttgtagttctccttgaagaggtccttcacatcccttgtaagttggattcctaggtattttattctctttgaagcaattgtgaatgggagatcactcatgatttggctctctgtttgtctgttattggtgtataagaatgcttgtgatttttgcacattgactttgtatgcttagactttgctgaagttgcttatcagcttaaggaaattttgggctgagacgatggggttttctagatatacaatcatgtcatctgcaaacagggacaatttgacttcctcttttcctaattgaaaaccctttatttccttctcctgcctaattgccctggccagaacttccaacactatgttgaacaggcgtggtgagagagggcatccctgtcttgtgctagttttcaaagggaatgcttccagtttttgcccattcagaatgatattggctgtgggtttgtcatagatagctcttattattttgagatacatcccatcaatacctaatttattgagagtttttagcatgaagggctgttgaattttgtcaaaggccttttcggcatctattgagataatcatttggtttttatcgttggttctgtttatatgctggattacatttatgatttgcatatgttgaaccagccttgcatcccagggatgaagcccacttgatcatggtggataagctttttgatggtgctgctgcattcggtttgccagtattttactgagatttttgcatcgatgttcatcagcgatattggtctaaaattctctttttttgttgtgtctctgccaggctttggtatcaggatgatgctggcctcataaaatgagatagagaggattccctgtttttctgttgattggaatagtttcagaaggaaaggtatcagctgttccttgtatctctggtataattcggctgtgaatccatctggtcctggactctttttggttggtaagctattgattattgccacaatttcagctcctgttattggtctattcagagattcaacttcttcctggtttagtcttgggaagtgtatgtgtcgaggaatttatccatttcttctagattttctagtttatttgcatagaggtgtttatagtattctctgatggtagtttgtatttctgtgggatcggtggtgatatcccctttatcattttttattgcatctatttgattcttctcttttttcttctttattagtcttgctagcagtctatcaattttgttgatcttttcaagaaaaccagctcttggattcattgattttttgaaggttctttgtgtctctatctccttcagttttgctctgatctttgttatttcttgccttctgctagcttttgaatgtgtttgctcttgcttgtctagttcttttaattgtgatgttagggtgtcaattttagatctttcccgctacctcttgtgggcatttagtgctgtaaatttccctctacacactgctttgaatgtgtcccagagattctggtatgttgtgtctttgctctcattggtttcaaagaacatctttatttctgccttcattttgttattacccagtagtcattcaggagcaggttgttcagtttccatgtagttgagcggttttgagtgagtttcttaatcctgagttctagtttgattgcactgtggtctgagagacagtttgttataatttctcttcttttacatttgctgaggagtgctttacttccaactatgtggtcaattttggaataggtgtagtgtggtgctgaaaagaatgtgtattctgctgatttcgggtggagagttctgtagatatctattaggtctgcttggtgcagagctgagttcaattcctggatatccttgttaactttctgtctcattgatctgtctaatgttgacagtggggtgttaaaatctcccgttattattgtgtgggagtctaagtctctttgtaggtctctcaggacttgctttatgaatctgggtgctcctgtattgtgtgcatatgtatttaggatagttagctcttcttgttgaattgatccctttaccattatgtaatggccttcttcgtctcttttgattttgttggtttaaagtctgttttatcagagactaagattgcagcccctgcctttttttgttttccatttgcttggtagatcttcctccatccctttattttgagcctatgtgtgtctttgcacgtgagatgggtttcctgaatacagcacaccgatgggtcttgactctttatccaatttgccagtctgtgtcttttaattggagcatttagcccatttacattgaaggtgaatattgttatgtgtgaatttgatcctgtcattatgatgttagctggttattttgctcattagttgatgcagtttcttcctagcctcgatggtctttacaatttggcatgtttttgcagtggctggtactggttgttcttttccatgtttagtgcttccttcaggagctcttgtagggcaggcctggtggtgacaaaatctctcagcatttgcttgtctgtaaaggattttatttctccttcacttatgaagcttagtttggctggatatgaaattctgggttaaaaattcttttctttacgaatgttgaatattggtccccactctcttctgacttgtagagtttctgccgagagatcagctgttagtctgatgggcttccctttgtgggtaacccgacctttctctctggctgcccttaacattttttccttcatttcaactttggtgaatctgacaattatgtgtcttggagttgctgttctcagggagtatctttgtggcgttctctgtatttcctgaatttgaatgttggcctgccttgccagattggggaagttctcctggataatatcctttagagtgttttccaacttgattccattctcttcgtcactttcaggtacaccaattagatgtagatttggtcttttcacgtagtcccatatttcttggaggctttgttcatttctttttattcttttttctttaaacttctcttctcacttcatttcattcatttgatcttccatcactgataccctttcttccagttgatcgaatcagctactgaggcttgtgcattcgccacgtagttctcgtgccttagttttcagctccatcaggtcctttaaggacttctccacattggttattctagttagccattcgtctactttttttcaaggtttttaacttcttttccatgggtttgaacttcctcctttagctcagattagtttgatcatctgaagccttcttctctcaactcgtcaaagtcattctccatccagctttgttccattgctggtgaggagctgtgttcctttggaggaggagaggcactctgatttttaaagtttccagtttttctgctctgttttttccccatctttgtggtttaatctacctttggtctttgatgatggtgacgtgcagatggggttttggtgtgaatgtcctttctgtttgttagtttttcttctaacagtcaggaccctcagctgcaggtctgttggagtttgctggaggtccactccagaccctgtttgcctgggtatcagcagcggaggctgcagaacagtggatattggtgaacagcaattgttgctgcctgatttttcctctggaaattttgtctcagaggagtaccccgccgtgtgaggtgtcagtctgcccctactggggggtgcctcccagttaagctacttgggggtcagggacccccttgaggaggcagtctgtctgttctcagatctccagctgggtgctgggagaaccactactctcttcaaagctgtcagacagggatattcaagtcttcagaggtttctgctgccttttgtttgcctatgccctgctcccagaggtggagtctacagaggcaggcagtcctccttgagctgcagtcagctccacccagttcgagcttctcggccgctttgtttacctactcaagcctcggcaatagcgggcgcccctcccccagccttgctgccaccttgcagtttgatctcagtctgctgtgctagcaatgagcaaggctccgtgggctaggaccctctgagccaggcaccggatataatctcctggtgtgccatttgctaagaccattgcaaaagcacagtattagggtgggagtgacccgatttttcaagtgccgtctgtcacccctttctttgactaggaaagggaattccctgaccccctgcaattcccaggtgaggtgatgcctcaccctgctttggctcacactcggtgcactgcacccactgtcctgcacccactgtctgacactccccagtgagatgaacctggtacctcagtcggaaatgcagaaatcacccatcttctccgtcgctcacgctgggagctgtagactggagctgctcctattcgaccatcttggctccaccctcactgccacctaacttttcaactggaaatgattactctgtaaagcaatgacataataaaatacaaatattaagaaaatagtctgacagaattctatctgccttttaagggataaatttgtacaattgaaattatatgctaatggattgatatcagtatttggcagttctcttaaatgtgaaaagctatttcaaagacaaaatctgtaaaatctcgtttcagatcagcattaacagatgagcaattatttatgatgagcacaactttgaacactgattacataaaatgttaataaaataattatcaaattgtacttgatttctattttgtgtttcatctataatactagcaagaatttttcttgttatacgaggatctgcattttatccttaattttgccttcagcctggaaacctaaaatatgtagtatctggccccttaaaacaattttgctgattcctgatctacttgaaaataaaattag

SEQ ID NO: 680 - DNA, 2954 bp, Homo Sapiens
tcttggctcactgtggatcctcttcctcctgggctcaagccaacgtcccacttcagcctcccatcatgcccggctaatttttgtaaatttttttgtagaggcagggtttccctacgttgcccaggctagtctggaactcctgagcccaagtgatccgcccgtctcggcctcccaaagtgctgggattacaggcgtgagccaccgtgcccggcctcatttatgaaactcttatctggcaggcaatgtgcaatgtgcttggcataaatatctcatatcctcacaataatcgtgtaaggaagaaactcggactcaacctcaagataagcaccaaagctcattttaaacctcactgccctctgcaagataactatacagatgctcctcgatttatgatgggttgcttcccgataagcccatcgcaaagttgaaaaatcccctaagtcgagccaccctaagttggggacgcctgcatcatgctttcagaggtgaatgtaaagtgggtgaagcggctcagtgattgagcgctagccaggattccacgccaggcctttccgtgttcaacagctgctttcagaagtgtggaagcctcggagagggtccctgaggtaagatgggctgagcgtcgccgccttctgcaaggacaccagccttgagagaagagaggagataaggtgcaaacgaagaaaggcagggacgccgcggtttcagtcgaagcgtgggctccttaaggacaggggctgtgtccgactcggctctgaatccccagcgcctacacaagctctgacacagcgtatactcagtaaacatggagtgaatcagttcattcaatgaatgaacgaatgaatgaaacgccagagcccgccacaggggtccgctgccgctccacgcccgggcctctcaccggccaatcaacactgtgactcgtacgccctgccccctgatgccacgcccatcactcgcccctctggattccctccggctgcgtggaaatcccggagcactggatttcccagaggcgcctccggtagcagtgcgcatgctccagcgccggtagctgaggcatcaatttcccgcagcgcctaggggacggattggaaagcgattggcttaggggacggaagccaagctccacctgcctgacacccggctcttcacgcagaaccgaagattcattttggacagcccttccccagtaccactcccaccccgacgttggtcccaatcggaacctatcctacacaaggctgaaaaaaagaggggagcgaccggaagtgacgcacgagcgcgagcggaaaaacaggggcccagcgcctgttgccgtggaaaccgagccctcggcttgcgtcccgggtgcgtcacagctccggctgaccacgccccgcgcgcggccccgaggccctgaggcccagggcggggaccaaaagccgcgcgcttgtgacgatgtcgctgcggggcacgctaaggggcggagaggaaatttagggcctgccttttgtacattcggttattcagcccagaaatatgtattcaaccccaggcgcgtgcctggcattgtggaaggcgacacgtgaggagaattgtgactggcccagatgtcacccccccccagcccagtagtcattcttctctggaagtccttacccatctcacctgttcattcttcaacccccagtttcccgacctttttcctcaagccacgcccttccacgctttcttgtcttttctgtggtgttccttcagtctagaatattctccacctagtacaatcctgctcctcccctgacattctgctgaaattgcactcttcagccttcccagctaccaggatgagacaactctactcagacccaagcacaccaagccaggaatgcacaaaggacggctgatgtttgagataagaactgtctcaaggactttctataataaccacacaaggaattcctcatgtacgtcacaagtctcatgcgtttctccacctacgttttgcacatgtgcacacatttattgatttagaggcagggatcttgctgtgctgcccagaccggactcaaattcctgggctcaatcggtcctcctgcctcagcctctagagtagctgggactccaggcatgcgccaccctgttatttctgtgaccaggcttagcactaggcattctttcggacgacagcaattcaaataagatgctctccaaagaacacttgcctagtagcggcatctccaaaaataaattgatgccgctccggctttgagcctccagaaccaaagaaacctgtttccagacagcttatgtgaacttctacttttggccaataagagctcccacttacccctgccctattcaggtgcacctgtggcttgccatagccatatagccaggtgcaccatcctttttgcctgctcctgaataaattaattatattaggagacatctttctctgatgtcttttttaggttagcaactctaatatgttggaagaatacaggccagctactttgtagaatgttcctcaatttgagtttgtatgatgctttctcatgattagattcaggttatgtatgttttgcaaaaatacctcagaagtgatggcatccttggtgcggcatccttggtgcattatatcaggaggcaaatgatgtgggtttgtcccattgtttgtaatggtaacattggttgcttggttaaggtgaagggtgccaagcttctccactgtaaagttcctatttttttctctgtaattaataagtaatttgtatgatactttgagataacaaagtagactgttcatcaaactttcatcaatgaatttaacatccaaagacgcctcaagaatgatcatcaaaagcagcctactaatgactgtcatttaccatttaatacatttcaaacagtgcacgtgctctgtgacatattctgggaaggaacatgttacctgatacataataggtgatcaa

SEQ ID NO: 681 - DNA, 1101 bp, Homo Sapiens
acgtatttgcaatccccttatgccataattaaagaaggactttgctgctttgggccaggatctgaacttaggtgtaaaccattgccctggcagagggaacctacccagtccattgctgcctgctacaagatatgaacagtaatggcacatattttggttatgagtcactcagaggactgtggattgaatgaactgtatccatccccatcatgatgtacagaaccaagtctcttcactagtaggtatttttttaattaatatcatgtacacagttatatgttgagattttcaccagagtacctacttttataatgaaaaatgtgtaaaacacatgtattagtgtcgccggtatgaaatatggctagatctagtctatttctgtatcaaccaattgtaaaatgaagaggcatgctgagctgtatctattaggtataagtatataaatgtggtaattatgtatacctatataggcagaatttagaagtatagcatcttccctcttttttaactgaattaagaaacgtcactggacagtttcgatgtcttctggtcaatatcatatagatctggtgccaatgtaagcttaaactttttaccgagtttatgctttgcaacagtttaattttattatacagggtatttgatgtgcttccactcacagatgcaccatattaacagttggtgtatgatatttacggtgttgtggaaagaaaattaaactcagtcagaagatgttaatttcatttcagctccagcatttatcctcatactagtcccctaatctctaggcctcagtttcttcatttgaaaagtgaaaggaatcgtttctgctttacctagttcataagatttcctttgaaggtcaacagaggtaacggatgtgaaattattagctaactctcaaactctgtaaaaataaatggtgttgtctgtggtcaactaacagcacaagtagagagctggaaaaagttgtgaccataattgtctcttccaattaattaatgcagtctactattttatatgctacttgcctaagagataaatgataaaatcctcattaattttaatttatgacccaaattaatttttggtatatttgag

SEQ ID NO: 682 - DNA, 27538 bp, Homo Sapiens
acacacagagacacaccgcgacacacacacacacacgcgcgcatacacacagcccgacacacacgcacgcgcgcttcttaaaggagacggctcataaaggattccccactacgccagcagaggggaagaggagcccacgggaaagaaaagcaggcgaggttaagaataaagagtgttccaggatagcacagaagcagagactttaagtctaaacagacctagattcagagccgacccgatgctgcttgaagaaggctggaggtatgttaaggagacaagggctgtcaagaagcagggatgtctctggaaaggttccccttgctgctgccatgtgaagaaggacatgtttgcttccccttctgccatcattgttattcatgttaggctcctgaaaacaccacaaggacctaccctccgggagccagccagagaacccttcttcctgcactgtctccgttatgcccaacatttctgggcataagttttaataaaccttacctgggaaaagtttgtttggcctcgtgttaattgctattatatggagagccaagaatctcgaaccagtaagagttgtgaagtcaccctcaatatttcccaagtcttcaaaggaattgagacactataatcattacccaggactccacgcttgtcaaatttgttgatgacctcctactttgcaaccaaactgaatagaatgcttgtatagactccctaatccttctgaaggtactgactgagcaaggctacaaagcctccaaatctaaatgtccatgggtacagacaactgacttatttaggccataaagcatctcggagcactaaaaaactcacagtaaaatatcttgaaggaattttgacaatcttttcttaagaagaaagaaaaaaaaccagaaatttttagaggcagctggttattgccatcaatggattcttaattttgccatcctagccaagcctttatatgttttcctctcaggtataacctcagaaccccttttatggccctctgagacactggcctcctttgaagcattaaaataagcattatctacacccccagctctcagtttatccaattttgacaaaccttttcaacaatattgccatgaaattaatgagattgttgctagtattctagaacagccgtttgtctctcaattactttttatggcatatttcttatttcgatcaaccctgtgacatcaggcatgcctccatgcctgtgtgcgaaagccacagctgccaccctaatggaaaaagcctttattcttacattaggcctccctactcacctctatgttacccttgatgtgtcagcgctcttacaagctcataaaacacagcaccctctttatacaatggcagaccactgatgaacaggacctattaacaattctctctctattgtatcattgtaacaccctgaaccgtgctattctattactcctccttgatgatggacagcccattctattctacgtgattcctttgtagctatataaatggtctcaaaactatgattttttagacatcttcttagacagtccagacttctgttttgtcatggctgtcaagcagaattctcaccgatacatagtaactgactgtgccatggtttccttaaatgaaacacttgagacaaattctgccttctatataatcagcctgaaccactgagtctagatcttacacgagccttggcaaagagaaaactgacactatttacacttgagatgtgctttggactctgccatactgttggctgtattgaaaagtcccgtttctgacctctgctggtacccctattgccaatggccatgtaattgttaacctattacgcctattcatcttctaattgaggttgcttttgtttattgttggcacatgccaaggagactgacactgtatctctggtagacaatacgtctgacaaagctgccaaacatgaacccccaactctggcaataacccattttttaacccagcttacaaccctgcctttaacacttactgacgtcaataatatttggcagataccctacaatgaaaaaaaaggctgcaagaagattccagacaattgttagaaggattatacgttggaccaaatggacttcctatagtcctttatcttttattgttttgtgcttctatttattgcccatcaaatggaatatatgtgtaaagaagggcaaatcaaagaggtaaatgacagtgattttgccctggaatccacagaatttctgatcaaattatttaccaatgtattacttgtaaatcttatgatatttctggatgtaagtagcataccccatgaaatcctctgagacccacattccctttgcaacactcctggtggactttatagatttccctcaggattcaggttattctcattataggttgactatacctaatctgaaaatccaaaatctgaaatgatacaaatccaaaacgttatgagtgttgtcataatgctcaatggaaatgctcatgaaagcattttttatttaaggtctttggattaaggatgctcatccagtaaatatgatacagctattccagtgtccaaaactatcccaaatctgaaacacttctggtcccacccaagcatttcagataaggaatactcaactcataattggtgattacctgcacagttagtagatggactgagtactatccaactagacatgctgatgccacatggtagtaatgaaaaaaaaaattgagattattcttcattttggcattacttaatgtattaaatcagaccaaggaactcacttaacaacagaagtaaatcacatgttcacaaaaactctaggatagtcattaaaattctatactctttaccatcctcagtcctcagagaggtggaatgtgataatttagacagcaaaagaactataaaatatgtcagtacaatagacctaagtggccagaagcatcacccctgaccccaataaaatctggaaaaccccaaacaagagagatggattaactgctttttgaataatttttgatagctttatgcctattagcatctccaaactttttgttcctgaagtgagtgagcattatggggacctgagtgaaaggttcagtattatgactagatatctaaaagaactatctcttgtacttggagcttaccattaacaggcaaaaaagtcatggccattgtctaccaacaagctttctatcccttttgaccaagctatcaagtatacatcaaaattttgacaagaaagcatacactgtcatctttctgggaagtaccttgtgaagcattgctgaacacctacatggccatcaaaataaaaagaaatatttcctggattcatgcaagtcatgccaagctagacccagatcataatttccagaaaaattgaaaagctattcttacagctgacttcaaaccaaggattttcagggccaattcacagggtcccaaagcagatgacaacataaagtggactattttttccaatatcttggatcaagaactacctttccacctattttcccttgatatctttctcttctctgaccaaaggaaaaaaaagtaaataaaaaccttaaaaacctctttgagctttaaacagaaaccttcccctttatttattgatggactgtctagagattgctacttttttcttcttctgtttcttcacaatgagatattttctaaactgtgtcttgcttcaactaacccttatggctttttttgacaattctagcataaatccagcacctactcgcgccagtcttctaaacactggcaactttcatcaatccgaattttggttatgtcaacatatcggtatacagaagaagctaactagtttttgtttctgccaatgcaaacacctggtggacacagactggactatggatgtacaaaagggtatggtatctacaaacaggaagacaaaaatcatgccacctctctttctggtaaactgatttggcgcttggaaaattccatggaagctcaagttctattctttgttcaggtgatgttattgaatggacaaatttcccttttcattggaaacagaaatggtactggaccctttctagcaaccaacacagcttctcgtttgtaaaacttctcaagatgtttcaaaatggaagaaataccaaaacccacaaagaatccttgagttggtatggttatttttagttgaggacatttgagattccacagatgcagaaaagaatcttctcagagcttccttcttctgattaaaagcagccacttctgggaaataaggctggcataaatcctctcttgagagtggctttactcccagaaacaagaccaagggtaaatctaccataaatcccctctccaggggagtttgatggccataaagaagatgaaaagagttctcacacctgcataaacaaatgttatcacaaactttcttatctcttgtttgttctcccaaaaaactatttgtctttcctaaagaaatccatttgttttccttatagaagtcttttctcccggcttgcttctcctattaagttagatatataaacttctaatttaacttttaggaaactacttcttttgtaagctcttgtatgcaaataaactgttttattctcttgttaatgtgtattttcacagcatatcctccacccagatcctgaatttgagagggtagaggaaaagttttcctctccaacactttcgttctctgtcaatggcttcactggattgctagtcttcctattaaaagcggcaatttattcttccaaagttagtttctaaataatattccatagaattttctttttaaataaccaggtaatacctacgttgacatcaagagagcaccatggtcagtaattttaataccccaggaacatacttttaagtatacattgtttttcaaccaatattggaaagggaaagttccaaaccatactaattggacctacattgaacatggtaaattcctcctcaaatagttgctaatggtttgctgggacagtacttcccatctgtaataactcttaaaattaaattactaatatctttggatttctggatcatcttttacttaatatccaaaaataaattgtgaggtttttttaaatgcctgggtaaaattctgaaatagtagtttatttcaattttgatagctgctgagattcacactagcttttcttcagtcgacacagtaaacaataaaacttcagcaaaactggaaaatataagaacccccaatatatagtcccccaaaggatccagcaggttatagagtccaaagcccttattttataaatgagtaaactgaagacaaaagcaccaatgtagttgcttgaaggttataaaatggcagggatacatgtatgtgtatatatatatatatatatagctccttaaaatgtagacttttgaaagatcagaggatttgaatatgtttacatgtcaagtgattttctaaagctttggctactgaattggctctgagtcagcatggccctttgccatatcaaataagaaaaatcacaaacagatgactaacttacataatgcatttcttttggagcgaggtccttggcaacaggaaagggtaatagtgattttaaacattgactcttcagtgaagaaggtcactgtgtggtcatggatgaggaaagtaataagataatgttgatggcttttctgacttagcatgcctacaagaaatcagaattctgggtgatgacacagtctgtctatcttaagtaatcttaactgggcatcaggccatcaatcttgaaaacataggttaaagctctttgaacattgattataactaagagcagctgactttttcactgcaccataaacctcttatgactctgactcatcagatgatttggaaaaggtgtactcactgacaaagaaaaagagaaaatatagatgagttaagtcactttagtcccagaggaggacaactgagcattaataacattttagaatttattttctgcctggggtcaaatgaccaatttcagacagcatttcaaattctttttttcagcatggcagagaaaagtacatcagagcctcaccagagcctgaatactttcaacccagttgaatagtttatgcaattaattatggcttttaatagaaatgtattcacttttaccttgagaggatgagaggacatcctagaatatgggtgaaagtcctataaccaacacctatgtgataaatggatttacattaggtatttagtccctaacttggcattctacctccttcatcaccaaattttatttcttcaccagtactctttctcaaaccattactcaatgacaattcaggccatataaactcaaacttttgtgatctgcatgtctatgctttaagtttcactctttaccgttctgtcactttaataaatattgatatagcattcccaacccaaattgtacatcctttgaaactttgactaaatgggtaataattatgacaatatttataataaataattataagagcatattatcagcaactgtattccacaaaactggattataaagaaaaactgaaaaattcctgaaaacacataaattagtgaaactggctcaaaaagagatagaacatctcaacagacctatactaactaaagagattgaatcaataattagaaaccttccatcaaagaaaagccctggaccagatgtgttcacacgtgaattctaacaaagagttaaagaagaattaatatgcatctttcttaaacttttccaataaatggaagaggaggaaacattttctaattcattttatgaggccaccattacttggataccaaagcgagataataaaataacaagaaaataaaattacagactaatatctcttacaaatataaatgcaaatatctatcctcaataaagtattagcaaatctaatccaacaatatattcaaagtattattcagctcaatcaagtgggattaacagagaaaaccaagggtgcgtcaatataggaaaatcaatccatgtaatacatcacataaatagaatataggtaaaaaagaaacacatgaacatttcaatagatgcagaagcagtatttaacaaaattgaggagaatttcatgataaaaactctcagaaaacttagaatagaataattcagccatatgataaagggctcttatgaaaaacacatagcaaatataatattcagtggtgaaatggaaggctttacccctaagagtaggaagaagacaagaatgcccgctttcaccacgctattaagcatggtactggaaggccctaccagagctactacaaaagaaaaaaaaaaagagagagagaaaaagcatttatgttgaaaaaaaaatcaggttaaaaccatctctatttatagatgtcatggtcttatacctagaaaatcccaaagaacctagtagaaatccccaatagctaataaatgaattcagcaacattgcagtataaaattcaataaagaaaaatcagttgagtgtttatatgacaacatgaccaaccaaacagaaaattaagaaagcaattctctttgcaataaagtctaaagtagttaaatactgaggaatagatctaaccaggtaggtgaaatacttgtattttgaaagttatgaatattgctgaaagaaattaaataagacatgagtaataaagatttgtgtttatggacaggaagacttaacattattaatgtgttaatgccacataaagtgatctacagattcaatgcaatccctatacaaattataacaggctttttcatagaaatgggaaaaatgccctcaaattcatatggatttttaaggggccccaaatagtcaattatataaagaagaaaaataaagctggaggactcacatttcctgactttgcaatgtaccgtaaagccatagtacttacaacagtatggtgttggcataaagacaaacatgtagactaataaaatgtaatagaaagcacaaaaataacccctgcatacttagtcaaattatctacaagtatgccaaaaccactcaaagaatgaaaggacaatcttttcaataaaaggtgctggaaaaactatatgtccacatacaaaagaatgaatttggatccttaccttacaacatatacaaaaattaactcaaaattatcaaaaactgtaatagctgcaactacaaaagtcttagaggaaatcattggggaaaatcttcatgacactggatttggtaatgatttcattgatatgataccaaacacacaggtaagaaaaaaatacagtaaagttgaacttcatcaaaattaataatttttgtttatcagaggacactatcaaaaaagttaaaagattctggttgctaatattttgttgaggaattttgcatctatgttcatcaggattattggcctgaagttttctttttttcattgtgtctctgtcagattttggtatcaagatgatgctggctttgcagaatgagctatggaggagtcctcctcctcaattttttttgaataatttcagtaggattggcactagtttttctttgcacatctggtagaatttggctgtaagtccatctggtcaagggctgttttggtttgtaggattttttaaattactgattcagtttaagaacttgttattggtctgtttaggtttctacattcatctcggttcaatgtttccaagaatgtatccatttcctctagatatttgactttgtgtgcataaaggtgttcataaatgtctctgaagatcttttgtgtttctgtgggatggattataatgcatattctcatatataagtgagagctaaacatagagtacacataaacataaagatggggacactggggaataatagagggggaagagagggagaggaacaaagatgaaaaactacctatggggtactatgctcactacctgggcaaggggttcaatcatagcccaagcctcagcatcacacaatatacctttataacaaacctgcacttatacaccctgtttctaaaatagaagttggacaagaaaaaatgatgcgcagtataaattatttaaatgttttgcagaaagtttatacaatttatttcctactagtttactgtgatttttttagataccatgattgctatgaatgatggtaacttataaggtggtcacaggaatggaagtggataaaaggtgatgaaattgagacatggaagccaaaaccaaaaggatcatatattgatgtggttttgggaggttaagagatgacaagattgattctggcttctgctactgggaaaatgtttgttttctggtttgtttatagagaacaagagagaaaaataaaaataaaaaaacaaggatatgcccccccttaaaaagttaaaaaagttaaaagaaaacctgtagaatgagataaagtatttagaaattaagtaagtgatacaagattaatatctaggacatataaaacgcacttaaaactcaacaataatgacaataacaagaaaaaaagttcaaaaaggccaaagcacttgagcaaacacttctttaaagatacacaaatggacaataagcacttgaaaagatgctcaacctcgttagttattagggaaatgcaaatcaaaaccaaataagataccacttcatacctactaagagggcaactacaaaaacccctgaaaaataacaagtgttggtgaggatgtgaaaaaattgacaccctcttgcattgctggttggaatgttaaatggtgcagccactgtgggaaacagttcagcacgttctaaaaaatgttaaaaatataataatcatatgacccagaaatttcactactaggtatgtatccaaagcaattccactattaggtatgtatccaaagtaattgaagcagggaagagaaacccatacagcaatgtccttagcagcattattcataatagccaaaaggtggaaacaactcaagtgtccattaacagataataaataagcaaaatgtggcataaagacacaatggaatactattcagccatataaagaattcttttcctactttattgaaatatagttggcagttaaaaatgttatatatacacacacacatatatatagagagtacaactagatgatttagtgtatgaatgtaatatatgaatacattccgaaatgttatcacaatgaactaaattaacatatataacctcacatatttacttttttgttatgaaaacaagatttatcttcttagtaaatttcaagtacacaatagaatactattaactatagtcacattgttgtacattagatcttcagaacttacttatctcacataactaaaactttgtaccccttgatcaatatctccccatatccctttcctccagcccctggtaactaccattctaatttttgttttatgggtttgactttttcagattccacatgtgagcttatgctgcatttgtctttctgtgtcaggcttgtttcacttagcataataccctccagttgtatgcatgttgtcataaaaggcatgatttctttcttttctaaaactgaataatatttcaatgtgtctgtatatgagtatttacagaaatgtaattatttttgtattttgattttataacttgcaattttactaaaggtgtatcagttctaacagtttttaaaaaatatttacagttttctacatatatgattatgtcatcaacaaatagaaatgattttttatttggatgccatttatttctttttcttgtctaaacgctttggctaggtctttcagtgctattttcaaaagaagtgaatagagtggaaatctttaccttgggccatatcttagaggaacaacttttgtgtgttccccattaattatgatgctagctgtgggcttttcatatatggcttttattgtgccttctaaaactatagacagtcctccatatccctgggttgcacatctctggattcaaccatggagagaaaacatataatttgtgggatgcaaaatttgcagatttgaaagggcgatgtttgtatccgcagttctgcaagtgccgaccgtgagacttgagaaaccatggatttttatatccacagaaggtcctaaaaccaattcccctcagatactaagggacagttgtattttgctaattgttttaatcatgaatggatgttgaatttcatcaaatgtgtttcctgcatctattgagatagccattttttaaaaattttattaatgttttatatcacactgatcgatttttgtatgttgaacaatccttgaattccagggataagtcccacttggtcatggtgtgtgatgctctgaatttagcagaatttggtttgcttgtatattatttagtacttttattttatgtttattagaaatatattgtggttttcttttcttgtaatgtttgtcttattttggtatgagggtgattctgaactcataagtttggaagtttttgatcatttcctatttttgggaaaaatttaagaaggtttggtgttaattcctctttgatgtttgttagaattcatctataaagccatctagtcttgggtttttatttgttaggagatacttgactattgctttaatcttcttaatttttttatctgttcctgctttttatttcatcttgattttattttgttaggttatatagccctaggaatttattcatttattctaagttatgcaacttgttgggatatgattattcataatattcctttatgatcatttttattcctgagacatagattgtagtgtcttctctttcatgtctggattttattatctgagtcctctctcattttctcttagtctaacaaagggcttattttttctaaacaccagctctggaattgtttcttcttttctattttcataaaatctctattgtacttatttgtgatctactcttgattgtttcctttcccccacccccccatgacattaggttagtttgttgttatttttctagttatttgtgatgttaagttaaagtgtttatttgaggtcttttttcttttataaagtaagtgtttatcactgtaaacttttctcatattactcttgtacttttattactgcttttgctttatctcataggttttggtatgttgtattgtcatttttaattctattttgatttcctctttgacccaatgattgttcaaactatgtgtttagtttacaagtatttgtgaattttccagttttcttcctgttattcgttttaagtttcattctattgtggtcaagaaaaaatacttggaatgatttcaatatccttaaatttgttaaggtttattttgtgaccttataagtgatctatactggggaatattccatgtgttcttgagaagaatgtgtattcttatgctgtttgttggaaagttctgtttgagtgtgttagttccattggtctacacattgtagaagtctgttgtatctttcttggttttttgtctaaatgttctattcattattgtaagtggaatatcaaaagtcccctgctgttattatattgctgtcaatttctgtcatcagatctgttaatattttcttcacatatttgcatgctttgatattgggggcatatatatttatgattgttgtatctccctgttgaattaatcttttatcactatataatgtttttctttgtctttagagacaggtttagaattaaactatattttatctgatataagtgtagtcacacctgctttcttttcattatctattgcatggaatatatttttctattccttcacttgcagcctatgtgtgtctttaagtctaaagtgagcctattgtacacatatctgtgaattttttttctgtataacccctctaggccttttgattggagagtttagttcattttcatgtaaggtgattattggtaagtttggccttactattgccattttgttcattcttttcgatctatttttcatttgtttctctattctttttcttctcttgctgtcttattttgttatttaataattatttaacattttactttgattattttctctttatcttttgtatatctattacagatttttctttgtggttggcttaatgtttgtatactgtatcttattctgagatactataagttgtatcttatagttaagccttctattttaagttggtaacaacttaacctcagttaagaatgaagttaaaactacagttttactttctccttcagctttgtgttattgtagtcatgatttgcttttattaatattgtgtatgcattaaaaaattctcatcttttaacttctatattagaattaaaataaattatgcatcaccattaatgcgtaagaatgagctgtatatggttatatagttaccttccccagtaaaatttatgctttcatatgcttttgtattgttgtttagtatgggtttatttcaatttgaagaatttatttaagcatgtcttgtaaagcatgtttagcagtgttgaactccctcagttttagcttgggaaagtttttatctctcctttctttctgaaggacatatttcctgatattctcgaatggcaattttttatttcagtactctgaatatgtcatcttattttctgctggtttgtgaggtttctgttgagaaatctaccaacagtcttatagagattctcttatatgtgatgttatgcttttttagtccctttcaacatttcctttttgtccttgactttagacaagttggccataatgtatctctgaagatcacttgatgttcagcttatttggggtttatgggcataatggatttggatgcctgtttctctgcacactttgaggaattttccatcatttaaaaaaaattagttttggctcctttctttttctccactctttctgggaatttcatttatatgtaaattgtttcacttaatggtatcccataagttatataggctttcttcacttattttcatttttttcttcttttcattcctctaactggataattttaagagatctctcttcaagttaactgattctttcatctgcatgactgagttttctgttggggctctctattgaaattttctgctccagaatttctgtgtcttttaaaattgtttcttattatataacttctaattttgttcatgcattgtttccctgattttgtttagttgattttctttattctcttgtagctcactgagctttcctaatatttttttgaattcttggtcagggaattgataaagctccatttttggggtggtcagttactaaaaaattattgtgtttctttggtggtgtcgtgtttttttactttttttgtttattataaccttgcattgatgtcttcctattttagggaatagtcacctcttcctcactttacatacttctctctgtgtgtgtgtgtgtgtgtgtgtgtgtgtgtgtgttggaagctattcacctattggtgggtacaagggcactggctaaaaagtgtgtggtagcctagtttccatgcagctccatcagctgaggtcagtgtcagcatagactcagggagatctcattagccaaggctgtgggcattcttttactctcctgacatagctaggaattttgaggtccttaatggtgaaggctgttgcagttctcttgttttattttacctccacagggtgaatttatggctgagggaattcattatggtgctggttccagcatttgagtgtgcttttggtggcagtgatgccagtgtgtgaggcacaaaattgcccagaatggttgcagaattagggtcggaagcatgagcattaacagagtgaccatggccagagactatggtgtgggcttgccacctgtggtgctcctgtcagatgtgggcatacatagagtgggtgcagagacaggatcctaaacacagaagggagtagagtaacagcaatgctggagtttgaatgtgcatgtttttgcagggggatagacgagtgggtgctggttctggcccagggtggtgaagtgtttccacagcaactttgatggctactgagctcctcagcagcaacaactgctagagtcttcctgcaggccactggggaccatagtatcacttgctgcatggctgaaactgtttggccctgccctttttctttgttttcagcttctccagacatctcatctatattgatctttctggtagtctggttggtatacaaccaaaatggacccttcaagcagtgacccaaaaggccagggcagctagtcatttgccctactttctttttcaccatgagggaaaatcatgggctgagagtttcttttcgaggctgaactgtcccaggctggaggataggacgatgcaggcaaaaaaactctttcccctattttttctgtgtagttattttttttccttcaatgtgttgctgcagctttttatctgaactgaactcatccagatctattttcatccaaagatagctgtctaattgttgtttctacggggagacaaaggttggggtagcctacttcaccacattgctaatgtcatggaaagaatacaattttgatataagcttcaacatggataaaccttgaaagaattttgcttagtaaaataagccagatacagaagataaatattgtatggttccatgtttgtcagatacttagaataaacaaattcatagaaacagaagggagactataaattactaagggttgaaggggttgttgaggggagaagggagagttattgtttaacgggtacagagttattgtttaatgggtacagggtttatacaccaaaccattctagtgaatacattaaaaatcagaaaaggaatatacacacctaaaacacttatcaataccagactataaattactaagatgaaattgagagctattggtgagttggggatgataaaacatttgggggtatagataatagtgtgggttgacagcattgtgaataaatttaatgcaactaaattgtatatttacaaatggctaaaattacatcatgttttatatatatttttccacaataacaatgcgatttatcagtttcataaatatttggaaaaaataataggggatactcatacctcaatgaataattgtagatggtgtcaaggtttatttctattttgttcttaccttcagggatcttcagtcaagtgaggaagatagtcatatgtttaaaaaatggcttttttcctgaaccttgttaattccagataattctactatcatatcaatatttctgtcttttcatgctatatcttccctgctttatctagcagacagttgaaacaaggaaatgagggcttgtagtatttgtgtattagactcttaagttaatccctattttgactacctttcccccttcaaatcttaaataggatataatgactgatcttaggaatatactatagaggatcttatcttatcttatcacatctaatgaaaactgatagcactgaaaaaatatttaactacatattgtacccaaagttaaaatgtcttatactgtcagataaatagttcaaaaagggctatagtcatattttaattagtaattttcctgtcaactataaaatatcactgtcattattcagaaaattgtctcatagtaacaaaatctataatttcatagtaatactttcacttgacagtcacattcattttctctttctctaagggatagtattacaggctttgaaagttaaacataaaactatctttatgttttgtgaacactaacataaaaactattctaataagatagcttgtgaatatataagctgtgtttatatactgtgccatcactatatgtttacatgtttataaaatcttttcatttataatgacatattatgttctagagatcattatagaccatttaagaagatatcttgtaggtattacaagcttcaaaataacacaaaagtacatttcattttttggcaaaacacagcattttcatgataaaatatcttataatgcatacataaaaaatagagaaatacactgcatttttgagtgagtaaacaagagaagatatatgtgccattggcaaagagtgttctgtttaagtttggtttattatacacaatgaattagtattttttagcttccatatgctatgccttattttaatgttcataatatgatcttgaggaagagaaaatatgctgaatgcctactgaattgctacataaaaattagatttgcttcagtgtaatgttatcgataattatattattgtacaaacattatatgtcttctgaactcctgtgagaactcatcaatacctctcatttgcatcttagtaatttatagtctggtattgataagtgttttaggtgtgtatattccttgtctgatttttaatgtattcactagaatggttttgtgtacatggtgctgactacacatagttaatcaataagtagctgttgatttgaattcaccttctaactctaatcaccagaatacctacaggaaagctccattccccaggcatgtaagaaaatatcaaggttacattaattttgaaagtgctaatctggaattgattttcagttaatgaggaaatgttttatttctctaggctttctaaagtattggatgttttaaatttgtttaatctacgtatttgtatgtgcatagttgataatttctttatttttaataaacatgggctatagatttttcccactagaagtaagctacattataacagtaaatatctttttcattttcactgttatatatccagcacctttagcaggaacaagtagatgctcaataatattagctaaatggaagacttaagaatatatattcagagtataatttcatgctttctgtttaaaaaaataagtcagagatatatttcatgacaatactgaaataacttcactaagaaatgtagaacaccggacatccagacaaattcatgcacacaaacacacacactattttaaagaaataaagaaaaatttttagatagtgacatatatccttaagtaaatatgtaattagtagaggcttctatcaaaattccaatgcaattttttcaggaattgatcacatttttgtaaagctcacggggaattttctgactcaagatcactgtttttttacatctcctttcatcctagatctcattaaaatagtagaataagtatttttaaaaataagcataaaacatagaaacattggaaggataagaataagctagaaggagaatggaatactgaagaatttcagataaatatgatttgcataaattaatagcaaaactcattagaactgaggaattaattctacacaggcaaaaaggcagacatctaaaacaacaaaaatttcccaaaagaattttggaatcacaagatcaagtcaagcaagtatcagagaaggactgggccatttgtcaaggacgagattagaccaaccattgcttgacaatctgagagaataacttgggcattgctcacctagtagctaaaatagtatggtggtggttaaaaacactgacttgggagtcaaactacgggattaagtaccacatcttccacttgttatctatgtaaacttgggcaaattttataatctagcaaatttcaatttatccattggtatataagagataattgttcatatggagttgtgagtattaaaaatgttaataaatggaaagtacttagaatggcacctgaaatatattaagtgcagtattagtgtttgctcttgttatttttttaatgggatttgagtttaaactacaagtatggctctctgcagtgagaattttaacataggctatacctagattggtcacttgggaaagaaaaacacaatagaataccaagtaatttaggactgccaagagggaaaggattttctatcacccggccgggcccggtggctcatgcctgtaattccagcactttaggaggctgaggtgggcggatcacgaggtcaggagatcgagaccatcctagctaacatggtgaaaccccatctctactaaaaatacaaaaaattagccggctgcggtggccagcgcctgtagtcccagctacttgggaggctgaggcaggagaatggcctgaacccgggaggcggagcttgcagtgagccaagattgtgccactgcactccagcctaggcaatagagcgagacttcgtctcaaaaaaaaaaaaaaaaaaaaaaaaatacaccccccacacacctcgccccagttgcacaatgtgcaccctcattattaggagcaagctttctgtagcaaatacctgaacttcactaaatggtgaataaaaattcttcctcattcaaattctcatccatacatgccagagataaatactactctgcttatatgacaaattacatatataataaataattaaaaataagcattttattctgcctagcacaaagaaactgaaatagcaaacagaaaattagcccacccaaagaaataaaaagagaaaacagaattattttaattgactactgagaaaacgaaccccaccaaatattaatttagaaaaaagaagtgaatagcagatttgactcaattaaagttaaaataagtgagataaaagaaaggacttaatttttttataatcaccagagaaaaagtatacagaaaaggtatgtgatataatggctagttcaagaattccaactattcgttagtataataacaaaataacagaattgagagaatgggcagagaaaatcatcagtctaatagaaggacattttccaaaataaaagctccagtctttggaaaaaagttattgtttgacattcaggattaacacaagaaaaaaaagtttgacattcaggattaacacaagaaaaaaaattctgcaagaagtcatatcctagtaacagcaaaactaagaatttgaacaaaacaaaaatcataaaagctttttcagggaaggggtgtgtttaccttctaaaggcaatggtcagtaaactacaactacagataatgggctacatatttctgttaataaaatttcactaggacacagacacacccatgaatttacttattgtctgtggctgtttttgcactacaaaggcagaattgagaacttgtaacagagaccatttaaccacccctaaaaattcaaacctagtgtatttactacctgacgctgaagaaaagtttacctacggggttctgaggaaagatgaattatgagctgcaagactaggtgcaagaagataatgaaagaaggcctttcaagttctacagaaagttttgaaactagtgcacaataaatacaacataagttggagataaaccaagaaaaattgacaaagccataataaacttgagtgatattaataaataggtccctgaaactaaaggaaatcagggaaaataggtcagtcttctctattagattcacttctgacagaggcctttggtacaattgtctctgattactccttgcaaactactgatattttgagaatgagatattgtgaagaacttcagccatctgacccaagtctattgattctctctccctttttgtcaatccctattttcagggcatctgaatttttcttctgtctccattgttatgcttagcaaatttccccaaacgactggatttctatgatggcctcatgatgattttacttctacatatatataatctattctgctcacccaagaacagattccctttgtttcttaaatattatttgaactcaagtgggttggaaatacctatagtactctaagaactcacacttagttccttcttgagaaaatattactgtttcaattttcttggtctctgctcttttccttgcactcctttctccactcagccttgtccctcattgacactcagcacactaaaaggctgacgtccccacatattttgatctcatgtcaatcctctgatgggtgccaatcttaatggaagtatatgagggaaaggcagggaggcaccacatactgattaactatgctttttgaataaaaatctatcactttggaaagcttaacttacaccattaaaaatcaattaaatgaacttttgagttgtgaaatttaattttctcttactatatactgtttcctaaaattttgtttgtaaaaattagatcctatataaaaattgagtcaattagattgaaagctggcttcaagatgataaagaaaacatagtaataaatttggagtcttaatttgcagatctagcaaatctgtggtctgtttttccttggcctcttcattaatattttactgtatgaaattgaagtgaattatcacataccataggcaatattgaaataggaggtgtttcaagcagtgtaaatgagaggaaaataattacagaacattaagtataaggcaaaaagtctaaaaataaaaaactatcaaattgagtaaatcaccattaatgattgttttgaaaagattataaaagtaagcaccactgaaaaccttgggtttacccatggcttgcagatatgtgaattatgagatttattataattagagcaatttattataatatcaactatgtgctggactttatctactatatgccttatcctatgtgttccttataacaaccctaggtaaaatctttttaaatctctattttaccaacaacatcaaacaactagataaagatgaaaccagaaatttaattttaatggtctgaacccagagtccacatttttaaccactatttacatacctattattagctcatattatatgcatcatggttaatccttctatgaagggaaacaagtttcacacctgatttgctgcaatagattataggcgttgctatggactgaaactttttgtcaccctgaaatgcatacattgaaattccagcccccattgtgataaaattaggaggtgaagctttttaccaataattagcttatgaggatggaatccttatgaatgggattataaaaggtatcccaagagccaggcaacgtagcttgtgcctataatctcagctacttgggagcttaaggtgggaggattccttaagcccaggaattctaggctgcagtgagctatgatcatgccactgctctccagcttggggtggcaaagtgagactctgtcttgaaaaaaaaacaaaaaaaaacccaaaacagcaacaacaacaactgtagagagttttcaacccctcttttcctctttttaccatatgagatcttatagcaagaagttgtcagtgtgcaatctggaaggaggccctcaccagaacttggccttgctgtttactgatcttggactttgagtctccagaactgtgagaaatactaagttggtgcaaacgtaattgtggtttttgcatcaacctaataaaaaactgcaattatgtttgcagaaacctaatatatttctgttgtttataagccactcagtctatggtactctgttatataagcccaaactgactaagacaggtgtacaacaagatgttgaacttctcaactttcaggaaaacttgaagggttttcagtttgtcagaattcctggaaatgtgtctgtcaatgagaagtaccccatagatagcagagcaccgcacaggcagatgaacactccatgatcttcacagacagtgagcagaacaggtacttgctgatactcattaatatcctgggcttggccaagaaaatgctctattacctggatagctactcaacaattgtaatagattcagaattcactactgcccattacccacaaggaactggtgatgctgctgaagggggttgggtttcagggatctgtagagcataacaaacaggcaaactgtctcatgatacacatgactatgggtggcacctccaaactctatcgttgaatattgtagtggatagaaaatggtggcagtctgtgctctctcctcttgaatctgggtgaatttgtgactgtttcatcaacagaatgaaacagaagtgatgcctagtgtctgagcccaggtaataaaaaactagcagtctccactttcctgtcttttggaattgtagctcttggaacccagtcatcattgtgagagaagcctgaggatctctatgaagatgactacatagatgtaaactaaggcccctggctgacagcacctggatgagcttccagccagcagccagtattaaggtgtcagccatgtaaatggtcttcttgaaaatggatcctttagttgcacttaagctattgtagctgataccactggggtggggctgaggggaggggaataagccatccttgctgaaccctacccaaattgcaagtttgcgagaaaactaaattaatattattgctttaagttgtaaaattaagggtggctttttatgtagcaatagaaaactggaactaatagtgctatttgaactcaccccagagttaatttctcagaaagtatacaaaactttgcaaataaaggcttcattttactgtgaaatcatttatatgaaaaattcagttacatttaaaatacattcacattataacagtacatttaatatttattaataaaataagttattcaactgtaaatataattcaattgaacaattttgcatggttctaaaatgctttgtatgtctttccttcttcttttctttttttgacaaagtcttgctctgtcaccaggctggagtgcagtggtgtgatcttggctcactgcaacctccgcttcccaggttcaagtgattctcctgcctcagcctcccgagtagctgagtctacaggcacatgccaccactcccagctaatttgtgtatttttagtagagatggggttttaccatgttctccaggatggtctcaatctcttgaccttgtgatctgcccgctttggcctcccaaagtgctgggattacaggcatgagcctccacgcccggccaatgctttatatttcttatgcacttatgcagagttacatattgctgacaactaacaatattttgaaaggattattataaacatgtaagcaaacttaagacctgatgttttaaaaacctccaaaatgttatgttcatggatcaagctcaagctgctcatgaaactatttggaagtattatacaaactaatacagtattttacccaagacttgaattgtatttttctaataaatatataatataaagattacattttgccgagctccacataaatacccacaaattgccccatgtttaatctcatgtgccatacatgaaaaagtttacaaatttctgatgtaaataatgttgttctcattttaaagcttaggaaacacacatagaaaatctaagtacatcacttcaaatcacacaaatggtaggttgtaaaaagagtttgaacacaatcagtctgtttaaatttcaagcccatgctctttctagtacgttttttgttttctgaataatttagctttgagaaaatcggttgacccttatgttacagtaatgtttaataatatgagtatacaactagttttgagctgctcatgcatcaaaattaaaaatgataataatataaacattttatcttgttgagcctagatttagtcagtatctttgtagatttagcaataccctgcttcacattgacctgatactcattaggcaggggaggatttgcctctagtatagttttgatcaaagccagtcacaaagacattcaacccagggatgtaaggtaaatccgcaaggtaatgcctccaaatttacactgttaaaccctggattgaaacagcttttgtgtgagctttgttaaccttaacaaatagcatttattctgagtacgcaacaggaaaaaaaaaaaagcagccctttgtgcatgtaattctgttacattctctacttgcaaattgattatattctcctgcatagcaacacaaaaatcatattttatattgtcttgttcttgaaaatatcaactaattatgagagtcagtgtagtagctatattaattaaaacaaacctattattttaaaacatctaatcactttcacacagttttggaaatgagatatctttctagatttattccctttcattactccaatttaggattactggttgttggtgatggtagcagtgttcatgattcatggtgatagttgcagtgtggctgtgtatttgcgattctgtatatgtgtgtatgtttctgctctccaatttaatttacctgtcattttgttgtatctatattttcactacatcacaaataagatcttagtgaataataagcaacaatacatgttgacgaatgatttgcagaagagcaggatgaagggtggggaatgtattatggattaagcctgtgggtttctatagcttagtagaaactagttgtcaaagtcactacctctacaaggacttctcttgagaagggccaaaaaacagagcatctttcgccaagaggtgaaatttgaatgggagaggcccttactcctctcgttctgacttaacaagtctttttataagaccaaaaaaatgttgaacctaacttacaaaaatccattgttttttttttttcgagacggagtctcactctgttgcccaggatggagtgcagcggcgagatctcggctcactgcaagctctgcctcccgggttcacgccattctcctgcctcagccttctgagtagctgggactacaggcgcccgccaccacgcccggctaattttatgtatttttagtagagacagggtttcaccatctctatctcctgacctcttgatctgcccgcctccgcctcccaaagtgctgggattacaggcgtgagccacagcgcccggcccaaaaatccattcttaatggctttctcttctgatgcaaaatcctgattgccttcaaatattactattagatagaaatctccccacctttagctgaaagagataaggaggttttgcactgaggaaacaaacaaacaaacaagcaaacaacattcatcaatttttaaaaaaagtatgtattgaactatagtcaggttcaatgaggaaatgcattacattgtcactaaactggccttagttggagaaagaacactggcagattaattaaagttattagcgcttatggtaggaaactgcatgatatatgtgaaagatcttttagggactggaaacacagtgtaaattcaaactcctcccaaaactttaacaaggctggatgaaatgaaaggaatactgtgatttctacaattgacaacagtgtcaggcatgcaggaaacaaacaaaaccttttgatgaaggaaaagtaacttctggacaaagtataattggttacaggtaaacagatatgtcatccaggcagatatgacagtttataggaaaaatataatgttatgatctaaaaaatgcaagccacaaacctattgcctgggcaataattagcctgaagttgggctactaaggagctggctaagcagcagtgataacaccagatactggaagaaacttctgtgatcagaaaccaatacaactagtgaacaattcacagtatttctaaatccgggcaccaaggaagttgtttggttagtcatgatggaagccaggaacaaatagatctcaaatgtgtgataataattatcaagcggaatgtctagaatattatagtgagtgccaagatttccatctaagacattaccaacatagcaactgaggcatgaattacaggttttacacaaaaaaagcattataagaataatacatataatatattaacagttcaaaagtgaaacaaacatttatgaatgggctactcagatttaaaataaaatattgcctgttcattgaatgctttctggattttactttctaattgtatacctctctttctttcttaagataactactatcatatatttgttttggactgcatgttaataaaattatataatatgtattttattaacttcataataaaaatactttttaaaataatatattgagattaatccctggtggattgtgcaactgtatttcattcattttcactgctttgcattcaattcaatccatgtacagcgtacccatctgttttactgtcaattgatatttttttctagatttttaaaatgacaaagcagcaatgaacattgcaactttaaaatttttggacctgtttcctggttcacatgtgttaagagtttcttcagagtgtgtaccttgaagtggaattattggattgttttgtttttgcatgtgaaactttattacatattgccaaaagactttcaaaaataatagtgccaacttgcagtttaagaagccccatgtgaagagacttactgcatgtacatacaacatttggtgttctcaaaccttttaatttttactgttctagaaaatattcctttttaaaattgtatatttctttgattttttaataatgatatttgctatccttttaatagggttttttttggccattatttgttattcttctctgaattgacttcttatatattttgttcatttttcttctttttttttttcttgagatggcg

SEQ ID NO: 683 - DNA, 2572 bp, Homo Sapiens
gggtgggagtgaccaggtgccgtccatcacccctttctttgattaggacagggaactccctgaccccttgcgcttcccaagtgaggcaatgcctcgccctgcttcgggtcgtgcacggtgcgcgcacccactgacctgcacccactgtctggcactccctagtgagatgaacccggtacctcagatggaaatgcagaaatcacccgtcttctgcgtcgctcaggctcgaaagcactgtattttatggcgaaatgttgaaagctatgcttgaaatggaaataggtgcagtggatgagatactgtttgataacatgagaagaccaacaagatcagaacagaaaccctcaggctacaaatacatggaaatagcaaatagtgccaccacgcccagctaatttattttgtatttttcggggtctcaccatcttggccaggctggtcttgaactccttaccttgtgaaacacccaccttggcctcccaaactgctgggaatacaggcatgagccaccacaccgggccaatacatagttttttataaagagatattcgcctgtgaaagaaattgaatccatggttgtcagaagtgaatagaaagttaaaaaccattaataagttaatattttcattaattcaacaaatatgattgagtacaatgagatcccaggcactattcaggatttccacagacatgaatgaaacaaaagtcttcctaatgtcagagctaaagtaataaacacagtacttttcaataaaatcacagggattattggacaaggaatgagtattcacacctatattcttttcttgaagacaagaatgttcaagcacactgaagatgaggaactaaaactaagacaatgtaaagaggtcaaatcgactttctctataagcaaagcaaaagcatcatcagtctaccatgactctcagtgaatcaaaagctatttatcagaaaaaaaagtacattcggccgggcgtggtggctcacgcctgtaatcccagcactttgggaggccgaggcaggtggatcacaaggtcaggagatcaagaccaacctggctaacacagtaaaaccccgtctctactaaaaatacaaaaaattcccgggcgtggtggcggttgcctgtagtcccagctacttgggaggctgaggcaggagaatggcatgaacccgggaggcagagcttccagtgagccgagattgtgctactacgccccagcctgggcgagactccgtctcaaaaaaaaaaaaaaaaaaaaaaagcagaaaaaagtacattcatggcttgtatctcaggtatatgtgggctttgattttttaaccagtctggtaagttgatgaaagaaatccctgctaaatatcagctccctacaaaaaccagtgtactatctgttgacaatgcaaagttaagttcattaaaagtaccacaataagaaagaactctactttgaaagagtcttaaaaagggcaaattatgaatgaatgtttacatggttgttgaatctgagctttggttgtcttttaaggggactgctttttgagattggataattttgtcacataatcatttagggttgtttgacttctttaagacagaaaccttgaagtaattcttggtaagaaaattgttagattaatatttaattgctcggatagcaaacaatttggttagataaattggtttcattactgtcttaaatattacagtgagggtttatagtcttattcttgtcctcttaagcaaaaatttcccagaccaaagactcagccctgatcatttgtcatcctgaactagaggatatataatcgtcatctgtggagatgatcagtccagatccgaactgctgattgaggagtggccgttatgtgttatgtttctaatggtgatcacttcaacgtctaggaacatcaggttttcttatcccttttctggatgatcaattgtggtttttaaaatttttttttatctttttagtggggcagcaaatgtgcaacagcattcagactttgcagagctcatctctaaacaaaccaacatgaccagcgtaaatatctatattcagagttcatatccaattctaagccagaatccaagtgtgcctaaattaaaacaggagttggattcaatctccaacctgaagagaacagaaatctacatattacattattctattatgatagcacatgtttcacctgttgagtataactgtctgcccaatcttattaaatttttatgtgatgttttctaaagctttagtgatattttcttgattccctgtcagtttttgaactggatggtttcccctgttttccaggctttgtgtaaaggataaggaggaagatgcttgaagaaaaaggaaagcaattcaaaattacctgtgagtggttaaatttgtcagatatcaagtaaacatgaggacaggtgattgatgataaaaggagctggatattgatcaagaaaaaatgtgacaaattccacatttgatttaaatgtataaccactttacatttcctcactatctttctttcattgttaatgtccataattctaaaaaataaagttatattgtta

SEQ ID NO: 684 - DNA, 2464 bp, Homo Sapiens
ccgaggccggccacaagcccacggtcccttctgcacggtccctgccgcgctggggccaccgtggaggcccggagggccctgggaggagggaggaggagcagaggctttcgggagaacccagcccttcaccggccaggggaggccgcgatgcatcgcgactggttgtgaagagccaggggaagaactttaccgtgcaggtgagtgggagacatcagaacacctgcctgtcctaaatacgaagcctcgaatcctaacctataaaaggttaccttagggtttagggttagggctacagattagagctagggattaaggttagagttggggttggggttagggtttaggggttagaagttagttttggggttaggagtggggttagaattagggtttggggttagtgttaggggtaggggaaggattggggtagggttagggttgggctagggtcggggtaggggtagggttttacggttagggtcagggttttagtgttggggttagggtattggggttagggtttgggggctaggggattagggtcaggggtgggggttagggtttgggatttggctaaggtttgtaagggttagggttttagggtaggggataggggttagggttacgtgttggggttgggattagggttaggggttacagtttagggtaaggggttagagttaagggttagggttagcattaggagttacagttgggttaagggttaggggttaggcttagtgttgttagggttagcttcagggttcggtgtcagggtttggggtggggtagtggtaggtttaggggtagcgttgtgtgttaggatttgtggttacggttcgggctagggttttaggggtaggcataggttcgagtttgggtttgggtgttaggtttatggctagcattagggtaggggttaggtgtaggagtaggggttgaggttatgagttgaggttagggttaggggtcaggggtccggtcaagggttggtgttggatttagggattagggctagaattaggggttagggttaggggtttgtgtcggggttgggttggaggcttgggttcagggtcaagtttagggttggggctagggcttagggttatgggttagtgttagcagttagggttaaggtttaggcttagggtttagtgcttgaggtgggggttaggtgttaggggttagggttaagggttagtgttttgcgttagtggttagggttaagggttatggttaagggtcagcgttagggtcaggggttaggggtaggggttgtgcttagttttagggttagggttcctggacggatggttttcctgcttgggaatgttcctgggctgtgagatccactcttctgggcaggtggttagcacctaacgttttccccttacttccccccaaattcttaagtcctttggtccatttcattacttcttttggggagggcctgattcctcagggcctcagtggcagaaccagcctgaggtcacctccctgtccatgggttaccacggcccctgggcaggcatggggagctggggtggcttgggttcctggccttggcacctccctttgggcggctctggagtgtggctgggctgttggtacaggagccacaggccactgcctttttggctgaggggaccctaacatcctggagcaggtggggcagggcccatggtctcctctaggtgggaggtgggaggctgaggcggcgtgggcaggcaggtggatggcgaggcagcatgggcaggacggtggatggcgggtccacaggggcagccagcagctcctgcacccactggggctccaagactgtgggcaagggaggaagggggagcccaggccggaggatcctgggggacggtgcggcccgggggccagatgtggtcaccgagcccagccaggcctagggccgcagcagccccagggcactgagggcgccacccagcccgacacagaggcacaggccgcccgtgggtccagcgcccgaagtccacgtacagtagctgtagatgccgagccggtcctgttgcctccgggaacccagtcctcctcgtcctccaggccgcgttccccgggtcccgcggcccttctccagcctgagcccgccgccccggccgcagccacgcgcagggaggagcccggggcaccatagcacagcgccggcctcacacacaccctcgaggcccctctcgagcccccgcggagccctccgcggccgcacgcagaggaaggctgcctcctgtagcagagcccagccattcgcgggtgcccagttcatcttcatggggctaaacctgcgggaagagagggaaagggcccttagtttccatggagatcgggtgcccagaggcggagggctcaaggctggagagcagagggacccccatcttttgtgggatcagggtgcccccagcatcttggaggcccactgaggcctgggggggcgcggttt

SEQ ID NO: 685 - DNA, 4526 bp, Homo Sapiens
tcttaacgcaattcacgggaacccactggcagcttctggaaaaccaaacaactcatggtgtggagctcctgattggggaagggacagggattggtctgtacctacattttgttgcaaaagagctcaggacactaacagagaggaaaactagggtggtctaggtggtaataaaatctctatgaaagaagagtatgattgtgtgactggggaatgggcaggtgctggactctggtgcagaggctgcctggcctgcgccaccccacggctggctagcagaccaagctacgttctttcattggctcctatgggacacagcatgggccaatgcctgcctggcctgcaggaaccgccagtgttgtttctagcaaggctccttggaatagatgtgaacacacaatgtaaaactgcatagcaggataaacacgtatggagtaggacaagctcacaacccaatgctgaccactactgacaagaccaagtatccaatcataacagatgagactttaacagttttgcataaatacatagtatttgtaaactattattaaggcactcaattgtaaaacaataattacagtgtaggaaaagagggaggaagcagctatcttctcatgcagcaaggccgacaggaaggacagtggaggactggtgatctgcttatcgggactcctgtctgagacagtgactgaagccggggccccagcacctatggccaaacaagaagacggcagtctctccagaaccacccagggcggcactggtcacagtttcattccagatcgttaaggccaggctattaagcatcaagtccagaatgcttcactctgctctgtggacgggaccagcgctctcgtctggatgttgatatgctagctgtgcttccaaaaatgaatgggtaagtttgccagaagccaaagaccaacttgtactctccagattccacaccccaccccccaactctttagataagaaaaattatggctttcaaaattaaagttttcaaaaatatatcattctcatacatagacgtggttaaaaaaccaacaaaagcctgtcatcactaaatttaaaagattattttgacacaaaaattgatctaccacatgaaatttgatttggcaaaacataccgaacttgatattttttgaggctatgcttttgttggctgagggaaagggggaacaacccacaggggtttaggaataagtggataatcaccttttaaggtgattttaattgacactagtgggaaaacagctccctataaagtaatgtatgtatttttaaaaatcactccaaggagacaaagtcctggagggaggatttttgcaaaaactgtgctcactaggtaaaatatgaactagccttgttcctgcagatccctcctggggtgctttctagaatagctttggggaacacagttctggccaatgttaagatgatggctcactcactcactttcagaattcagctggtccttgaaggctttctggtttcactgagttaatctggcggacccagctgagggcaagatggaattgtggaagagcttcagccaactgtgttcacctgccttcccccatgtacgcaacctactccatcctgcacaggtgaggctagtgcggggctggcaaagcttgtggtcgggaggagggaagggtctggccttaggtgtcagagaggcagagggcttcacatttacccagtttcttcctacagggccatgagcagccctgtgtggcaaatcaaaccaggggtcagcaactttttctacaaagggcctgacagtaagtacctcaggctttgtgggccacatgaattctgtcacatattatttcttttttttacaactccttaaaaaggtaaaagccatcgcttgagccagggaggttgatgctgcagtgagtcatgattgcactactgtactccagcctaggtgacagagccaggccctgtcttaaagaggaaaaaccattcctagctcacggggccacatgccatagtttgctgacccctgaattcaacctttctgcttttctgcaagctgcctctctctcgaaatgttttgacatctagcttgctgacacctttgattcaagcctggcgcagcgggactggctgagctcacctgagtcttaaaggggccgcccacagagccaggcagcgactacagatccctcttatactccctcactgctgctgggaagagctggagggaaacaggaagcagtaatctcactgcaggaaggggcaactgtagacatccgggaagcatcccgacagtcccgttcctttcggggaagccgctgaaatctcctttcccttccctagatgggccctagtggacctaagcatctgggctctcagcaggacgatgtgtctcagaaccaccacctgagccagacacttgagcaatttcaaacctaaacacaatcatgtgtttcagcagcagacactcaacaatgcaggtgggcccttccccttgagatttaaacttcagcattagcaacaactgagaacaacccatacattttccccaccggacccctgtgctggtcaaacacgtaacaacacaaccaggacagggcgcctgcaccaccattcgggcacagagtcagctcaacaacagcgtgggactactcatctgatgactttactcagcagtgcttggggctgtcgggttaaaagtcttgacacgtctggggtcccaaccaaaacacaaaacgaaaaattctttttttggaaaaacgctttcagacagagcattattccctggaacaagccttggtcattcgtgtgttttaaaaataaaaagcgcagcgagaacagaggtaggacttaatgttgccatccgagagttttctgcgaggccaagaatgagctagaacgtgtgccgcggtgaggctgccaccaccaggactcttctgcaggatgcgaagggaacagtctggatgtgtgcgcctatgtgtgcacgttcttcctaaaacatggttcttcttgaagacacggtgggagcggagttttgtgtctcctggccggcggctcctggttctcccaggccacacgactgacagctccccttcttgtgctgcatgttggttagtttcttctcctcctctctatggcaagagtaggggaaaagttaggatgacttcactcgtttaagggaaatcaagatgtaaggggtcgatccaaatccacagtgaaagtgagggagggatcatatgaaaatatccgcccagcctgacgcagcaaaaggcgggtcagcttttgctcatccacgaagggctctttaagttttctggggcgggtttccctgatggtttggaggttgcagctgggtccctcggggttccctggggctcatgcaagaaggaagattcactcaaagtggtgtcctgggagtcagcgacggtggacgggtcagcctcactggacaggtcttccgttgagaaggtgagactccccagcttggcaagagagtgtgagcgcttcagtggggaagagacggtgaggcccgccagccggagccgggtctcaatctcctgtgtccgctgcttcaccagcccgggcttcccacggacactgtggatgctatcgctgctggagctccgggtcaggttggagctcatggaagaggaggtgggggtgtagcagatggtcttcagaaagtcttttgagaaactactggtgtggtccaggcggtagaagaaaggaggggggctcttcagtgagcctccttccaatgaagcgggggcggcctctgacttctcatcactcccggcctggctgggcataaccagggggcccagctcgtggagcgcggctggatcctggctctcctcggggatgctggcctccagcctgctggcagggccatccctggagggaggtgctgggtctgcaggcacgctcttcagccgctctagctctttggtgtgcttgcggaccaagcctgccttctgcagctgaatgatggactcctggtgctgcatcaggtagctgttggttgtcggcttctcagattcattactgaacagaagcctcaggtccttggctggcttcatatctttcttgggtgacgattcttcctttattaccacttctgtgctgggagggttcttatcacagtgagaattcttcaaaaggagggactttggcaggacttttggggtctctctggaaggttccaaaaggctggctggtggctctagggcagctccagccccagggccactggtgtctgccctcctggagcctgctggtggtaggaacgggggaggttcggttgggccagaggctggcttctccggaacacgggacctgctggccaagtgggccacaggggaggacgtgatgtggggtaggaaggctggctgggtgcagatggcgggagcattggggtcctcacatcgctccctggaggcctcaggagccccgctggctgtagggtacatgcagtcggcacaggatttataggaaggcttcactttgttaaggatcccaaatatagcatcatcctgcaa

SEQ ID NO: 686 - DNA, 1649 bp, Homo Sapiens
tgccgtctgtgggaagctgccctaacccattcgccttccccggcttggaaaaacaatgtcccagtgatgaactgccttgcagatttattttgatttaaatcgccttcccttcaacccaaaccagggcacagaaaggtggttagaatgttccagcacaaactcatatgagcacagcagctattccagggaaaagcgtcctccctacctgcaagaagcttcctttcaagacactgatattatcaagaacgtgaaggaagagtggcagcggcccacctgaggcacagcagagctgggggtgatgagagaaatttaagggaaatggcccctgttggacacgggcttcctttgactgtgtgggaatcccacctggccacagacaaagggtagaggaagcaagtgccccaggagtcttgatctcagcccagctcagcatgaggaaagcagcaagcaggaagagtgagtgttcctggtaccacggctaccaggctcttcccagtttagagtgctcaacattctaaaacttgaccagccagctgggagatttgggtattcagatttttgggtgccttaagattccactggcagtagagaatcactaaatgtccatttctgaatgaattctactccccagagacattaacacacgatgtacttggcttgaatcctgtttgatttaagaaaatcggccaagagtccttcataagttactcacatctgaggcaccatcgggctgaccgtgggacactccagatggggagtgctgtgtaccctctgcctctcctgtgacccgaacacctcctctctctctccatggacgacgttttcatcttatggtctgggaatgctacctgaccaccctggagggtcacccaaggaaagagttcgttccaaagacaggtgctcctctgagttcctctggaatctggcaaggtgccgagcttggacgcaaggcttccatgaggctgtgaaggaggttgcacggaaactggtggggatctgaaaagcttttagtggcctcgccacacacagcacttcagatgctcaggtgatgagcaacattttccaaacccagctagtgagcaccccacctcctctggcttccagaacctggtgtggagggccaggagaggcttcgggactgaagggcagagcagcagactccggggctcatgtaggaaggaacatgccttcagccaaagattatccacgctgcatggagactcttgctaaatatcactggtaaatgcacaattatgtcccatttagagatctctagcagagtgtcttgtgtttgatggatttgtcctgcatttaattataacttcctgctaaagctcagatgttttctttcaggggtaagactgaagaaaagaaataaactatgctacctgctcttaataaagatcattttattttaaacaggaggctgaataaaaccttttgactctgtatttcagacaaatgcagtggcttaatttcattcaatcatttactgaggatctgaaatgcatgcggttagtggtgagaatactgactcagggctgtcccttcctctggagttgacagccgactgcgcaggaagggaaggtgagggtcaaacacacaggtcaacatcagaaacagcacttccgccttccattggccccgat

SEQ ID NO: 687 - DNA, 7804 bp, Homo Sapiens
aaagtggtactagccctgcgcaggtggggacgggtgctcggtttcctctagggagggaaggcgagagggggcggtggcagcgacaacaatgcagctaggtgccgtggcttcctgcgcgcggcggccgccaggtgcgtctccagactcccggcggcgtcgggcaggggatggttgctccgccgcaacggccgccagtgcgtacagtgaggcgccttgcagcgcagcgcggtgcaggctccacgggcccagacaccccgcgcgctgcacatccgggtcctggtgtgcagatggggcgtgggctcggcaaccagctggctgggggcgcccggcggagaaaagcgggacccctgctcccaaattccttggagatcgtacagccctcacctctttgcaggcgccccccccatcctgcctccccacccatgggaaaccttggatctgcaccagttgggacctcttctccaaagcgctccttggctttggagctaagtggcttcgtgcccgtagaagtggatttcaaacttcaataatcaagtattttagtgcaatttattttttatttttatttttgtagagacgaggatctcattatgttatccagggtggtctcgaatgtctgggcttaaatgatccttctgtctgggcctcccacagtgctgggattacaggcgcgagtcaccacacctggctagtccaacactttaaacataaaaaaatcagtgcaaaagagtccatgatggatgaaataccaaattgttatttatttatttattttcgagacggagttttactcttgttgcccaggctggagtgcaatggcgcgatctcagctcactgcaacctccatctcccgggttcaagggattctcctgcctcagcctcccaagtaggtgggattacaggcgactgccaccacgcccagctaattttttttttggccaggcttttctgcaacccctgacctcaagtgatctgcccgcttcaacctcccaaagtactaggattacaggcatgagccatcatgcccagccttttttttttttttttttgagagccttgctgtgttgcccaggctggagtgcaatggagcgatctccactcactgcaacctctgcctcctgggttcaagcgattcccctgcctcagcctcccgagtagctgggattacaggtatgcaccaccatacccagctaatttttttttttttagacggagtcttgctttgtcaccaggctggagtgcagtggcgccaggctggagtgcagtggcgcaatttcggctcagtgcatcctctgcctcccgggttcaagtgattctcctgcctcagcctcccgagtagctgggactacaggtgggcaccaccacgctcagctgatttttgtatttttagtagagatggagtttcactgtgttggtcaggttggtctatgaactcctgacctcaggtgatccaccggcctcggcctcgcaaagtgctgggatcatgggtgttagccaccgcacccggcctgaaataccaaaattttaagtaaagagccagacgtaggagtgtgcgcctgtggtcccagctacttaggaggctgaggcaggaggatcgcttgagcccaggagttggaggctgcagtgagctttgatcatgccactacactccagcctgggcgacaaaattataggaggcggttgttttagactaaactcttgtgctaggcaccaagacacaggaataaacaaaatgcagctagtcacactcagattctaagtcacaatgacgaagctaagttgttatctgacctttgggaaaaccaggagggagccctatcagcccattttctcttttattttattttctctctttctttctctctctctctctctctctctctccctttctttccaggaggagtctcacatttgtcgcctaggctggaatgcaatggcgcaatctcggctcactgcaacctctgccttccaggttcaagcgattctcctgcctcagcctcctgagtagctggaattacaggtgcccgccaccacacccggctaatttttttgtatttttagtagagacggggtttcgccatgttggccagactagtcgagaactactgaccttagatgatccggccaaccaattttccaaacaggccagtttcagccttcagtggccaatgtcctaaaattccctctgcttaatttctttaatccttacacaaaaaaactagcctggccgggtgtggtggctcacgcctgtaatcccagcactttgggaggccagggcgggtggatcacgaggtcaggagatcgagaccaccctggctaacacggtgaaaccccgtctctactaaaaatacaaaaaattagccgggcttggtggcgggcgcctctagtcccagctacttgggaggctgaggcaggagaatggcatgaacacggaagtcggagcttgcagtgagccgagatcgcgccactgcactccagcctaggcgacagagggagactccgtctcaaaaaaaaaaaaaaaaaaaaaaactagcctgaaacaacctgatggtaacactaatgagttaacacattctttgctgttgggtttttgttgttgttgttgctgttggttttgagataggtttctgtctcccaggttgttgtgcagtggctcagtcatggctcactacagcctcaaccgcccgggctcaggtgatcttcccacctcagcctcctgagtagctgggactacaggtgcacaccaccacgcctggctaattcttgtattttttgtcgagatggggttttgccaagttgcccaggctgctctcaaacttccgagttcggggatcctcccaaagtgctgggattacagacatgagccaccccgcccagcctgttctttgattttgctctctacaacccctctcttcctgtagagccaacctcctctgcccaactgattggaacagttatcctattttatggaatgaagtgtagcaaattgcaatgaagccggttaaggtccttagatttgttgaaatgttgtccattgacagcaaaaccccagctctgccattgcacgtatgagtcttaccttcattccggccctgctgattctgcgggggattgggtttttttgtttttgttttgttttgttttgttttagacagggtcttgctctgtcacccaggctggagtgtggtggtgccaatctcgactcaccgcaacctcggcctctcaggttcaactgattcttgtgcttcagcctcccgaatagctgggattacaggtgtgtgccaccatacctggctcatttttgtaattttatttaatttattaattttcttgagacagggtctctctctgtcactcaggctggagtgcagtggtgggatcttggctcacttcaacctccacctatcaggatcaagtgattctcctgcctcagcctcccgggcagtggggactacaggtgcacatcatcacaccggctaatttttggtatttttagtagagacgaggtttgaccgtgttggccaggctggtctcgaactcctgaccttaagggatctgccagcctcagcctcccaaagtgctgggattacaggtgtgagccaccacacctggccaggttttgtttttaagtataatttgtatttgttttggtgaagattcagattcacaagaagttgcaaaaatagtacagagagatttgtgcacctttctcccagctttccccagtgatagtatttttataactggctgggctccatggctcacacctgtaatccctgcactttgggaggccaaggcgggcgggtcaactgaggtcaggagtttgagaccagcctggccaacatggtgaaactcctgtctctactaaaaatacaaaaattagctgggcatggtggcgggagcctgtaagctcagctactcaggaggctgaggcaggagaatcgcttgaccccaggagacagaggttgcaatgagccgagattgtgccatcacactccagcccagacaacaagagcaacgctccatgtaaaacaaacaaacaaacaaaaagcttgaacccaggaggcggaggttgcagttaactgagattgcgccattgcactccagcctgggtgacagagcgagactccatctcaaaaaaaaaaaaaaaaaaaagattcaaaaaaagttttacatagccatgttatgttgtcaaaacctgggcgttgatgttagtataatggaatcaactcgagtgcagacattatttcgattgcacccgtttttacatgtaccttcctctgtgtgtgtttggttctattatttattattattattttttgagacagagtctctattgccgagtttggagtgcagtggcgcgatctcagctcactacaacctccgcttcccaggttcaagcaattctcgtgcctcagcctcctgagtagctgcgattacaggcgggcgccaccacactcagctaattttggtatttttagtagagacggggtgtcgccatgttgcccaggctggtcttgaactcctgaccttaaatgatccacctgcctcaatctcccaaaagtgctgagattacaggcatgagacagcgtgcttggcagttgagagaaattttgtctcacttgtagattcctgcaacccttgtggtttgaaggttctgtgtaatcatggtactgtgtctgtgttttaaaatatgttttgggctgggtgcctgcttcaagcctataatcccagccctttaggaggctgaggcaggaggattgcttaagcccaagagtttgagaccagccagggcaaaataacacgagatccccatctctacaaaaaaattattattatttttttgagatggagtctggctctgtcacccaggctgcagtgcaatggcgtgatctcggctcactgcaacctccgtctccttggttccagcaattcttctgcctcagcctcccaactaactgagactacagccgcgtgctaccacacccggctaatttttgtatttttagcagaaacggggtttcaccatgttggccaggctggtctccaactctggacctcaggtgatctgccttcctcggcctcccaaagtgctgggattacaggtgtgagccactgcgcccagctccccccccatttttttttttttttgagagagtcttgccctgttgcccaggctgggtggcacgatctcggctcactgcaagctccacttccagggttcacgccattctcctgcctcagccacctgagtagctgggactacaggcacctgccagcacgcctggctaattttttatatttttagtagagaaggggtttcactgtgttagccaggatggtcttgatctcctgacctcgtgatccgcccgcctcggcctcccaaagtgctgggattacaggcgtgagccaccgcgcctgaccccaaattttttcttaaattagctggccatggaggcacatacctttagtgccacctactccagagactgaggcaggaggatcactggagcccaggactttgaggctgcagtgagctatgatagcaccactgtactctggcctgagtgatagctagaccctgtctctaaaataattataataaatcaatgaagagtccttatcagttacaaataactgccaagcatatttacagaagaaatggtataggatttgcattgaaataacaggaagaggctggccactgtggctcacgcctgtaatcccagcactttgggagcccgagacgggcgaatcacctgaagtcaggagtttgagaccagcctgaccaacgtggagaaaccctgtctctactaaaaatacaaaattagctgggcgtagtggcacatgcctgtaatcccagctactcgggaggcagaggcaggagaatcgcttgaacccgggaggcagaggttgtggtgagccgagattgcactctagcctgggcaacaagagcgaaactctgtctcaaaaaaaaaaaaagaaaagaaataatggggagagtattgagggagaaaaataaaacaaaatggaatatatgtgttgccaattgttgaacctgaagggtggatcaggagggactcaggatgctctctacctaaaattgctgagccgtggcctggtgcagtggctcatacctgtaatcccagcactttgggaggctgaggcaggcggattgctagaggccaggagtttgagaccagcctggccaacatggtgaaaccccgtctctactaaaaatacaaaaattagctgggtgtgatggtgggcacctgtaatcccagctactcaggaggctgaggcgggagaattgcttgaaccctgaaggcagaggttatagtgagctgagatcgcaccactgcactccagcctgggcaacagagcaagactccatctcaacaacaacaaaaaaattgctgagccctgtcctagaaactgtcagaataaggtgtttccatgttagctgcgtctgtatcagcccccattctgtgatgatgaaagccagtatcagatgggaacacctgcccaggcattggctaagccactatcttttttttttttttttttttttttttttggattcagagtctcactccgtcacccaggctgggtgcaatcttggctgactgcaacctccgcctcctgggttcaagctgttctcctgcctcagcctcctgagtagctgggattagaggttcgtgccaacacacccagctaatttttgtatttctaatagagacggggttttgccatgttggccaggctggtctcgaactcttgacctcaagtgatctacctgccttggcctcccaaaatgttgagattataggcatgagccaccacatctggcctttttttgttttgttttgtttttttgtttgtttgtttgtagatttgggagggggagttttactctgctgcctaggctggtctcaaactcctggcctcaaaccatcttcctacattgacctcccaaactgctgagattacgggcttgagctgccatgcccagcctaaaccactgtcttaatctgcatccagctgtctccaaaggctaaaacacctccccttcttacatcagatatacaagtaatgaccaggcacagtagcttaacgctcataatctcagcactttgggaggccaaggcaggaggattgcttgagcccaggaggtcgaggctgcagtgagttgtgatagtggcactgcactccagccagggcaacagagcaagaccttgtctcaaaaataaaaaattaaaaagacatgcaaacaataatctttctgtattatcaagcacctactgtatacaaggcactgttttggttcagggatctgcaaacgttttctgtagagatccaggaaataactattttctgcttttggaccacatataatgtctagagcaattactcaactctgccatctaagggcaaaagaaaccgtagactataaataaacaaatcagcatggctggccgggagcggtggctcacgcctgtaatcccagcactttgagaggccgaggcaggcggaccatgaggtcaggagtttgagaccagcctggccaatatggtgaaaccccatctctactaaaaatacgaaaattagcagggcgtggtggtgcacacctatagtcccagctacttgggaggctgaggcaggagaatcgcctgaaccgggaggcggaggttgtggtgagccgagatcacaccactgcactccagcctggccgacagaacgaggctccgtctcaaaaaagaaaagaaaagaaaaaagaaaaacaaatgagcatggctgtgtgcta

SEQ ID NO: 688 - DNA, 1383 bp, Homo Sapiens
gatatttgggttctgggtctggatcctggtagccaccacccaggtagcaaacccattgctgcaaggatgggtgatgtatgtctcactcaccttgtttctcatctccctggtgttcctgttgtcttccttgtttggatttgaatcctggagagttctgttcttcgccttcgtcaccatgctgctctacattctccatgccttcagcatctattaccactgatgcacaggcaccaggccaagggggaaatactctttgaaagccctgattatttctccccgaaagcagcttccaatgcttgccatctggatgataaacagaagatccactaaaacatccacaggattaacagagcttccttgcagactaagcgatgacaccacactttggacatttaaattcactctactgaataggaggaagcctttattttccttttcctgggaaagtaactgtctcttggaattatctgaccgtgaacttcctcttctagcaaactcacatgaaagccctcactgttgagaatcccagctccactgtcaagcctgtttggggattttgcctcagctgtgggcttccctagagtaggttcaggggaatactcagcctgattatcttaaaattgaagaagtgccaccaaggccttcagatctaatgcagatccacagaccttgctcctggtacttgttcagcctgtgctggggagccatggtcctgagttcccggggaggctggcagggtcaagccaccctgcccaccaccctcccacttcccctcccctttcctctccagcattgggatccaaggaaaatctgcatgaagccaattttgagggtagatttgtgtggaaaataaatcattatacagtaagacctggggcttgaggggtggggaatggggagggaagggcatagcctgctcctccatgagtctgacatctcagaaactgtgcagctgccggacgcctgggtcaggactccaagaccccacctcttaaggacaagaaaatgcctggttcctcagaaaagaccctcagggaagaaggtgaaaacattacatccaaggattctcctgccacaactggattggaagaaaaggctgccgcatcatctcagcgaggagtgaaggaaccatgtcccggggaccgcgctcctccacctgcactcaccccctcacattctcttaagcaccctgtggcccttcgaggcctggcagaatggtggtgcccaccgggttgggccagggctcaacgggcaaagttgtgcacactaaaatatcaaatcaaggtgcttggttttaaagtaaatgtttttctaaagaaagctgtgctcttctgctgacccagatgagtagggcacagccctgtaactgcacttgccttctgt

SEQ ID NO: 689 - DNA, 13997 bp, Homo Sapiens
gagtcttctccagaacatctctcgattaaactcctcggtggtctcctgggcttcgccgacttgtgggtgtggcgtgtgggggccgaacggtggcgaatggaaaagctgaggtaagcggagccacctccctcgcccaagcccggctccccgccgccgccccagcccgccctctccgcgaccccgagcccggcctctccccgaccccgagcccggcctctccccgaccccgagcccgcccctgccgtcgcccgttctaactccgtcagctcaccccgcactcgaggcaggagcaaccgcagctcctccgccaagtgccggagctgctccaaaggcgaagccagggtggggactgcggctgcaggtgcagttgcgctcgccatctcagtcgcttgccgaaggccgcaaacacaggcctccgctgccactgccggagccgcactgcgacagccgctccacttccgggccacagcgtcaagggctcgtttccgtcaacaagccgtccagccccgtcccagaggccctgccctgcctcctcccgccacgaggcccggccccgcccgaggtccagcaccacccatcccgttatcagagaccaggcctggccccgcctcctcccgccccgccctgtcccctgaggtacagcaccaaccatcccactctcagaggccaggacaggccacgccttctcttgccccttaggccaggctacacaagcaagcctcaggctcaccgtctttcttattcatcattcattcatttatttgattagttgaaaacacttccgactaaggaagcagagagcccacaatcctgtgggaaaacaggcctgggaactaatatctcaggggtagtgagggtcgggcccagatcctcaaaggttccctgcccctgaaattgcacctttgacagctgctgaattccaagcacagcggtaagtgctttacatggggtaaccctaaaaaacacactgggcctcagacactcccgtacacacacccaacctctaccctgtggatgtcctagataagggttttctcttcacaaaggtaaatcaactctttgcctccttagggagggaaggaataaaggcattatttttgagacttttctgcagtccattctgcaggtatcagtagtgggtaatccctccaacgtccaggactccaaacgagcagctgctccctaaagctcacccaccaatcctggccctccacctgctactggggtagaggcctgggctacagacacagaggctgggcttctgcccagctgccagtggtgagacatggccttcaggagctcaggtggctttttaactgcaccatgaagattccaaacttggtggagttcagtgtccacacataacgaatgagaacaggtgtcagcagtgtcaaccaggtccgcaaaggggagaataaaaaagctagggtgccgtatgttgcataaagaaagtagcaggaataaacctgccagatgtacagcagtagcataagtaggtgaacaggcataattttcaagtattttctttgatggagatgagacctgaagttgtgaccaaagcaccgctgcagcaagctccaacacatgtaagccatcaaggggatgttaaaaaacgccagctggaaaagaacagaaccatagcttactcccaagtccttggaagagtttggtcttaataatgcattattagtggatcctaagactatgctgctatctgtcttggcgttagctaatttacttcaagcacagttgcttataacacaacagctgacttgtggctagttgtgtatttgcccatgtccttttattcatcttagaggcaggtatcatttaatttatgctgaagtcccaacttgtagtacagtatcatatacacagttaatacccaatggtgttaagctggaattgaactgagtaaatgtatacacacacatacaacaacccctcttttttggtggagtgaggggaggacttggctatcagtattttttttcttacctccatttttgtttgaggtagcatgataagtactggaatataaattagagtatctaaattataatccaagttgagctgctgtatgattcattcatttaacaaatatttattgagcacccattatgtagcaggcatgagctaggctccaagttggggacacaatggcaaacaagttagaaaaggtccgtcatagagcttacattctaacagggagaagacagacaaaaaaaaaaaccaaaaaatataattacagatcgtgattagttcaatgaaggaaagaactgggtcatgagaaggtaactgggagaaaggctctcagaggccagaaggacaagaatgaatcagcggagggaagtgcattctaggcagaaggaacaaatgaaaagcccagaggtgggagaggtcttggcctctttaaggaagtgcatgcagagcatgagccaggtggaaattggggcagtcggcaggacccagatcactgctctgcttcaaagcatttcaagctgaaaagtaagtgagctgattgtaaagtttttaaaagagcacactggatgctctgtattaagctgagagtaaggaggcaagaatatcagggagaagacccaggcaagaaataattacaacttagattaggaaaacagaaatggagagaagtggatggattcaagatatgcattggaagcagatcaaataaggtagagcttgctggtgaaatagatacagggtatgaaggaaagggaataattgaggatacatcttggagaaatcaggtgaatggtggagtcatttattaaaactggaaaaacagagaggaacaggtttggggtggaaataatgttcctatcagagagacatcacatgaagttgagatgcctgttagacatctgtggccattggatatagaggcacttgaagtgcagagaagaggtctagatcagagatatagatttgggattcatgggtctggatgatacataaaatccattattagtgtactatttattagaatatgaatgtaaacatttacaaaggaaaaaaccctgccttttggtaaggctcaggattcatttggtatgagagagctccttagagacagcctccatcaacataatagaaaactgcaatgaggctgggtgcagtggctcacgcctgtaatcccagcactttgggaggccgagacgggcggatcacctgaggtcaggagttcgagaccatcctggccaacacagtgaaaccctgtctctactaaaaatacaaaaattagccgggcatggtggcaggcacctgtaaccccagctacatgggaggctgaggcaggagaatcacttgaattagggaggcagaggttgcagtgagccgagacgatgccattgcactccagcctggacgacaagatcgagactccatctcaaaaaaaaaaaaaaaaagaaaagaaaagaaaagaaaactgaaatgaacccaggacctactcatgtatataatgctgctatgcagagaatattctggacttgggtcagtgtttgctaggcagaagtctttcctacttggctgtctctaatcctgttggatcatgttctactgccctgttagaaggccatgaacttattttgaatgtttttggatctcttccaaaacttcaaattttggtccactaactccattaggtgagtaaaataaagaaactgttagataaatacttttcaaatctgtttatgtagtttttctatggatcaaggttctttgtgtgtttattttaaaggaatcaaatgtaaacctaatacatcagtttgtttcctaaacaagtacattgctaggaaagcccaggtctggtttttgaataatgcagtttccactgaataactgacccatttttttaatgtgtctattttttagtttcctccctctaaaatattttccttcttcatcatcataatcagttttggtttactcagaaatctaaaactttttctaccataatcccttgtttcatttttttgtcaatgaaaaagcacagtgaaacaaaaacaacaaaaacttctttcacctcttataaacacttcatgacaaaaatgtattttaggctaggcatggtggctcacgcctataatcctagcactttcggaggccaaggcaggtgaatcatctgaggtcaggagttcgagaccagcctggccaacatggtgaaaccctgtctctactaaaagtgcaaaaattagccaggcatggtggcacatgcctgtaatcccagctacccaggaggctgaggcaggaaaatcgctggaacccaagaggtggaggctgcagtgagccaagattgcaccactgtgcttcagcctgggcgacagcagaacactgtcttggggaaaaaaaaatgtattttagatgtttacatgagagtggtggaaggagtttaggaagcactttaaaagcaaatgaagcttttattaaagactgccctgcaagtaaagtaggaaagatgatctatggtacttaattctggattttggatttaattcataactgttatgcaattagtctgacaagtccaagatgttcttaaattgcttttctgacttcttacctggagaattccaattataaatgttatgctgccttgtaggaaatgtccattaacaaatatcccaaaggaaaagcagcaaccaaatttgccatcaatgatttcaccaaaaaaccatggacctaaaagaggcaatggacaaaaaaggaggagattaaataactataattctgattacatatatcatgagatacatttataggaataaagcagagatatgagactagccatctataagcattttatttcatagccttccctctttgctagtctctgtgttgtacttgatatccttgctaaccaactattttttggattgtgaaattgtcttagtagacactatacctagaacagatatgtgtcttatagattctagaaacaaaaaaagcacactcacatttttgaaaattccattgcaataataacctcaatataatgcattaacatttcctttaagatgtaaagaggtattccacagaagttaaatttccagatgattgagatttactccttaaagcaaaaaaacttcaactactttttgaaagaaatctttctaagatgcactcgttaatataatgaatgtattttaacctcttcttgaaggcccacagtcattactttgtatatcaactacataatcacggttaccatgtagaaagtttaacttgcttcagttttctcatctggaatgccatgctgacttttctatcctccctattattatttactgccccattctcagtgtgtgagtttctaggtattattattattattattgtcattttgtcttgtaagtgtgctggtctccataagagtgtcaagttgtttgtcaagagtgataagggacagttagatttccgtttgcaaaatgcaaatactaggccaggcagggtggctcatgcctataatcccagcactttgggaggccaaggccggcagatcacctgaggtcaggagttcaagaccagcctggccaacatggtgaaatcctgtctgtactaaaaatacaaaaattagtcaggtgtggtggcacatgcctgtaatgccagctagtcgggaggctgaggtaggagaattgtttgaacccaggaggcagaggctgcagtgagccaagattgcaccactgtactccagcctgggcaacaaagcaagactacatctcaaaaaaaaaatgcaaataccatcatttgctggcaagaatagggttcagctttaaaaagtcagaggcaattttctcagatatactttatataaactgcattaaagacatatgagtctaaaaaggtgttttgtcttcagatttcaactttctgaatggaacaattcttccctattaatgtattttgttttgttttgttttacagcccaggaaccaaattacttgctttacctcattgtgtaagacaagcgtcaaaaacagcttcaacctatcttgaacaagagaacttacctccaaaggtgatctgccatagcttacacagaatcataaagtgttatattttcatttgttctctggtgggagttactaatgagcaaagtgcaaagggaggataaaagtgtaaaataaagactaagactaggcaacaaataggctaatgtactcctaattgacttttagtcactaagaaacataagcaaaaaagcctaaaagatttatggtgatttctgcttttataagtgtggctaagtgactttataagtacagtcatgcattgcttcaccatgaggatgcattctgagagatgtgtccttaggcaattttgtccttacatatcatacacaaacctacatgatatagtctattatatacctccagctccactagagtcttatgggaccaccactgtatatgtggtcccttgttgactgaaatgtttgtcatatgccacatgatactactgggtataataatacaacagaagagtgcagatatgcctgaactattgctcatctcagtttctctcttttttgagctgaatttttgagagccacacattagtaaatattcaatgaactacatactaagcaaaataggcaaaataccaatggatagatatatatactttttttttagatggcgtcttgctgtgttgcccaggctggatttgacctcctggactcaagcagtactctcgcctcagcccccaagtagctggaactacaggcatgagccaccgtacccgcctaccagtgaatattttaatgagttaatagataataaacacagaagataggtataaattctgataaaggtaatgatggaagtaaaacctgtgatgagatatagactaaaactttaagatagacaaagaaggttgctctgaggaggtgctatttaagcttctattaggtttctacacaaatactaattctgtagcagtcttctcagcacccttaagttaacttggtgttaactaaatgtcctttaaacatgttaggcacgagctttattttccaaaaccatgtcccagaaaatgatttatgaagaatccatgagccatttgttataccctcaagagtctaattctattgtcaaaattgttaatatattctttggcaaaattccccataatctgtactaatttacttacccagcactgtatacagggtcaacaacaacacagaatagtagaagatgtttattttgctcaagacatgaagagaaaatgaggtcagatttataaaccctgaaggttctaaaaaacataaagttgaaaaacccagtgaacacatgcaaagttcagtttctttatgacattttctagaagattttcatgggctatctaccatatattcagcaaatcctttgttagatggtaactatacagatgacaccactttaaattcagaatttggcaggaatcctggtgagacagttcacttagaattgcaaaaggcagagagttcgaagaaatggtgtagttgtgagatattttatatatatcataagatacataattgttatatatatcacaatatatcgaactcatatatatatgcacatatatgtacatatacatatatatataataactgaaagcaatggacacacctaccagagcaccatactattttatctttatataggtttgaaagatagtggtttgttcaaaggatgatcaagtctctgttttctatggaatttagtgtccaaatgtacaaacttcaaaaaggtatatcaaaatacttcaaaagtaaattaaaagaaatatcaaaatatcttcattctaatcataaatatgagtatctgtccaaatatggtcctttcctatacattatacagttctttttttttaatttttattattatactttaagttttagggtacatgtgcacaatgtgcaggttagttacatatgtatacatgtgccatgctggtgtgctgcacccattaactcgtcatttagcattaggtatatctcctaatgctatccctccccctgaccccaccccacaacagtccccagagtgtgatgttccccttcctgtgtccatgtgttctcattgttcaattcccaccgatgagtgagaacatacggtgtttggttttttgtccttgcgatagtttactgagaatgatgatttccaatttcatccatgtccctacaaaggacatgaactcattttttatggctgcatagtattccatggtgtatatgtgccacattttcttaatccagtctatcgttgttggacatttgggttggttccaagtctttgctattctgaatagtgccacaataaacatacatgtgcatgtgtctttatagcagcatgatttatagtcttttgggtatatacccagtaatgggatggctgggtcaaatggtatttctagttctagatccctgaagaatcaccacaccaacttccacaatggttgaactagtttacagtcccaccaacagtgtaaaagtgttcctatttctccacatcctctccagcacctgttgcttcctgactttttaatgattgccattctaactggtgtgagatggtatctcattgtggttttgatttccatttctctgatggccagtgacggtgagtattttttcatgtgttttttggctgcataagtgtcttcttttcacatagcagatttggtcttttcacatagtcccatatttcttggaggctttgctcgtttctttttattcttttttctctaaacttcccttctcgcttcatttcattcatttcatcttccatcgctgataccctttcttccagttgatcgcatcggctcctgaggcttctacattcttcacgtagttctcgagccttggctttcagctccatcagctcctttaagcacttctctgtattggttattctagttacacatttgtctaaatttttttcaaagtttttaacttctttgcctttggtttgaatttcctcctgtagctcggagtagtttgatcgtctgaagccttcttctctcaacttgtcaaagtcattctccgtccagctttgttccattgctggtgaggaactgtgttcctttggaggaggagaggcgctctgctttttagagttttccagtttttctgctctgtttttttccccatctttgtggttttatctacttttggtctttgatgatggtgatgtacagatgggtttttggtgtggatgtcctttctgtttgttagttttccttctaacagacaggaccctcagctgcaggtctgttggagtttgctagaggtccactccagaccctgtttgcctgggtatcatcagtggtggctgcagaacagcggattttcgtgaaccgcgaatgctgctgtctgatcgttcctctggaacttttgtctcagaggagtacccggccgtgtgagatgtcagtctgcccctactgggggtgcctcccagttgggctgctcgggggtcaggggtcagggacccacttgaggaggcagtctgcccattctcagatctccagctgcgtgctgggagaaccactgctctcttcaaagctgtcagacagggacatttaagtcttcagaggtgactgctgtctttttgtttgtctgtgccctgcccccagaggtggagcctacagaggcaggcaggcctccttgagctgtggtgggctccacccagttcgagcttcccggctgctttgtttacctaagcaagcctgggcaatggcgggcgcccctcccccagcctcactgctgccttgcagtttgatctcagaccgctgtgctagcaatcagcgagactccgtgggtgtaggaccctccaagccaggtgcgggatataatctgctggtgcgctgttttttaagcccatcagaaaagcgcagtattagggtgggagtgacccaattgtccaggtgccctctgttacccctttctttgactaggaaagggaactccccgaccccttgcgcttcccgagtgaggcaatgcctcgccctgcttcggctcacgcacggtgcgctggacccactgtcctgcgcccactgtctggcactccctagtgagatgaacctggtacctcagatggaaatgcagaaatcacccgtcttctgtgtcactcacgctgggaggtgtagaccggagctgttcctgttcggccatcttggctgccagcgctttccctatttctacagttcttaacgcacagctaacctcttactccaactgaaaggcttccctaaactttccaaattaacgtgcttttaaaatacagtgccaaaaagcccaagtgtaagggcttgactcagagaagctccattctgcggccacagtctacagtaccacagatcctcagccccaaccagccatgtcacccatgcatgtggctggccataaaccagtcagctgaggactatgaaaggaagttcagtatacactgagcaacactactggtaaaaaatatttaaaggactagtctcaatgaaagacagtctgatgtaagttaaataagtcatgtctttgctaaaagaccagcacattcattttatacttataaccttgctcagcctaacacttcattttatgcaaagcctgataatgcatgacctttcctactttgtgttactctctcagcttcttttttgttctagtctgtacttctcaaagtattagcctacatattcagatagaataataattatttattattttaaaaaatcctttagccttagaggcagctattctttaaattttaagtaattattctccattttggctgcacattagaataacctaggggaacttttagaaaatactcatgcttgtatctcaccctccagagattctgatttaatttgcctggggtagagggagatcttaggcagcaacccagtgattctaagcagtcaggattgagaaatactgctttagacaaagccgtgcttctcagtcttgactgcacattggaatcatccagggagctttaaaagatactgatgcttaggtcccaccctagagattctgatgtaattggtatagaatgctgttatagctattgaaatttcagaagttcccccagcagtttctaaggtacgaccaaagtggaaaagtcttgtttagaggaaagaactgacctggggtcagaagccttgggtttggagtctctcctctatctcttattagctatgaaaccttggacaatttacataacctcccaaaacctttgttttctaatctttaaaatggggtcaatagcacctacctcacatgattgttttaaggattaagtgaaacaatgtaggttaaaatatgtttcaaatttaaataactatataaaaatattgagagcccccatataagaggctggggacttcaaatatttatttacttacattatgttcaggaaaatacacatgtataataatgcttcttgaactttttcgtagaatttttaaaataaatataagaagaaaaacattcagtaggatgtgtactgtacctattcagttaatcatgttactgtttaatcattactacaatactccccttctctatcatcagtccttaatcccagggatttcatccaaattaagaagggatcaggaaaatttgattcaacaagtatttattgtctattatacacaaatttggtgctgggggctgtgggaaacagaagagaattaggaagcaagagttcctgcattgaagacaggcacagtggctcaagcctgtaatcccagcactttgcgagtctgaggtaggcggatccacctgaggtcaggagtttgagaccagcctggccaacatggtgaaacccatctctactaaaaaaaaaatacaaaaattacctgggtgtggtggtgcatgtctgtagtcccagctacttgggaggctgaggcaagagaattgcttgagaacccatgtggcagagattgcagtgagctgagatcataccactgcactccagcttggggttcacagcgagactgtctaaaaaaaaaaaaaaaaaaaaaaagttcctgcattgaggaacttatctggttaaggagaaaatgtatatacattcgaagtggttatataaagcaaagtggctgtctaattaagtatagaattaattgtgagaaaggactatagggattcagataagcaagagctcattatgacctggaatggctggagaaaacagtatgataaaggaggtcttcaggtaagccttacaggaggctaagatttagataagtttagaaaaataacttaaagtagggataatactatgagaaaaatacagaagcagaaatgagcatggcacgtatagggaacagtgaaaaagtatctaggctaaaatacaggtaactggttgaagacatggctagttaaataagactagactgtggaagatttttagtgtcttgcagagatgtctgacctttattcagtgtgttctggaaagccacttaaggcttttgcatacagaagtgatctatggatgagatgccataagaaggataattggctaataatgaagaggatgaattagatagagagactggatataagagcagcagttaggagtctattcaggaatccagagaggtgatactgacatggcattggtgacctctcaaaaggaaaaggaacatttgaagaaataattaatgggttgttttgtttttttgagatggagtctcactattttgcccaggctggagtgcagtggcgcagtcttggctcactgcaacctcagcctcctgagtagctgggattacaggtgcatgccaccacacccggctattttttgtatttttagtagagacaaggtttcaccatgttggccacggtgctctagaactcctgacctcaagtgatccatccaccttggcctcccaaagtactgggattacaggcatgagccactgcacctggcctgaattaatgagttttaatatgttgccattaggagtgaagactgatgcttactgaaaaatgactagatttttaaggtaaaaactgtagtaaggtcttcctgtaaggtctttatttttgatagtctatatgtttttatttttttaatatcagtatatgtatatatttttctatcaaaatatagtgatttcaaatgcctgaaagttcatgtgacttaagtaaatctttcataaaatacctgattttaaatttgttgataaaaacagaaatgtcttcagaattgtcagcatacattttttgcctgggtttactgatcagatagttttgcatttctctgtgctagatgttttaagcaggatttgaccaaaaggtcacaaaactatatatccagcctaaaatcagaatgatctttgtgtaactctttgataagtaaaactaatttaatatagttgatttaatgaagatagctgttttcagtttttggcaaaatatttatataattagctttaagatttctacttaggtgaacacccgaaattcacatgctgtaaaactgattaacagaaagataccttgacataatgactaactctatctaatatcttagttttcataagtaatctatgtgtagttaaaaaataagttagatgaatgtaaatgggataaatttataaatgaacttttcatgtgattttaaatcctaaagttacattatattaaattaagtaatagatactcatgaaatgtctgagtcatttctaagtaagataaaatactgaaacataaattgctaaacattagtataagttggttcttggtttcttaaattgcatagaaagacaaaacatacttgggtctattagtaaatagtaaactccacattcaaaaattgttccataaaaaattttttttagagattataaactatatattcatgagatgttaatatataacagttcaaaattacttacttccagagtaacctaaagcttaaggttactaaaaattaagtttttattaaggctgggcacagtggctcatgcctgtaatcccagcactttgggag

SEQ ID NO: 690 - DNA, 3242 bp, Homo Sapiens
attagctgggtgtagtggtgcatgcctgtaatcccagctacttgggagtctgaggcaagagaatcacttgaacccaagaggtggaagttgcagtgagctgagatagcgccattgcactccagcatgggggacagagtgagatgccgtctcagaaagaaagaaaaagaaattcacaggaagagacagggaggcaggattatccagagctgtctatagcagagctgctgtgcacagagcctggtgctccagccctccgggctgggcggttgggaggagctcactgtaagcataccactctgaaatctctggtttagagcagcctagggcctttatgtcatccacgatgccataaaaaagttttctatgtatgccatgacatggaagaggtggggaaaacattggcatgaagtaacagcagaggactacatcagtgttaaggaaatctgaacacaatcctgtcagagttccagtgctgccgttctagaattttgttatcttataggtaatactttgaaaacaaataatccacatatctataaatccgtctggaagaggaacaaaaatgaatatacaaagatgtcattgttgtgaaaaaattaaaaaaatcttcaaagtagcaaaataaaataggtaaataagttatagtaaattcatgctatgaaatagtatacagctctttaaaatggaatttttctgaaaaggacacatactttaaagtgagaaaagcagggcacaaaatttgatacaagatacggattttgtaaaccgcactcagaaaataaaatcagatcattgcatgcaaaatagtgttcctgggtgatatgattataactattttttcaaaatagtttacttttttcaacttaaatataaaataaaacataaaaataaaaacgtgataatgtattcgatggcagttttaaaatgtaggattgcttgtatcccagaaatcttaagaaaatgtgtctaatcatttcatttctactttctatacctgtaacttacatggttgggaatacagtacggatgtccttttttaaaaaattaaaatatatacaacaccgtgaaggacttccttctagtgcagatgactgacaaaatgaagagaagatgcacctgttccagtggtgtctagtgatttgaacagaaagaaactgtgaagaaccaggaatgaaatcctgagatatgaaggggactgtctgaaatccatgtgcctttttgaggtagtttcgtatcatctcctggaagcagaaatgctacaaagcagtggaaggaagctggggttttccctgtcattggggagtttaactctggggagcttatttttccccaactttattaaggtatgatggataaatgaaaattgtatgtatttaaggtgtaccatgtgatgatttgatatgcatatacattgtgaaatgattacataatctgtctaattagcatatccatcccctcccataattaccttttttccgtggggaacacacttatgatttactctctcggtaaatgtcaagtatgcattattactaactataatcgttatgctgtacattagaacctgctcatcttatcctttaaccaacattgccccattaccacaacagattagagatttaaatctcttataatgcttatatttagacattttagaactctaaacttaaaaaaaaaacaattctgcttaataagagatttatccccagattatttgaagacaccaggaagagagaggtcagggaagggagtgtggcccagggtgaaggttcagcgaacacctgctagatgcatgcaggaatgaacatgccaacaagccttcccactgaatgcacccaagtagatgacatgagaatgcattctctgtctgcaacattcttggcttaacttgccactgactttagcaagcagccatgcattcctgtgatgcagctttaatggcctttcatttgctcacattggctgagccctgtgcagagtggatgccacctcccttcctgcagccctgccatcatgtccccaactgtcctcccccaaccctcctccactcctgtcacctcagttccaacaatatccttccttctctttttagcaggggatggtgagactaatttttccccaccccatctcgaaactaaggacttcagattgcatcttggtgttgcacttgaaacatcctaaagctaacctgtaagcttgtggcagctcctgggaggtggcatttcatagcttggtttatttgccaagttccctacactcttaggtatcaaagaatccagatgttcagtttctcctaatccctgttgataccctattttttttaaaataatagctagccctgattcctgtatgtctgaggattacagctattttttaaaatttaatttttaaagttctactagagatggggtctcactgcattgcccaggctgtcttgaactcccagccacaagtgatcgtttcaccttggcctcccaaagtgctgggattacaggcataagccaccatgcccagccccgattttgagttatcaattaataccagcattaaagtaggtgaagttctatgacagttcatttggcaactcaaagccctgctttccaagagcttattccagtgctttcattaaaagaggtaaactgaaacttttgagttcatgtcacccacattagcaatgtgtacgtgggtgcagccttcttcaatcgctatctttttagaatgagtcccttatttcctaggctaatgcttagtttctttgcaaaagtgcattcagactgaggtagcatccacttttaatgcttctgtgcattaaaagttgttgcgggaagtcagggaccccgaacggagggaccagctggagccacagcagagaaacataaattgtgaagatttcatggacgtttatcagttcccaaatactagttttataatttcttatgcctgcctttactttaatctcttaatcctgttatcttcataagctgaggatatacatcacctcaggaccactgtgataattgtgttaactgtataaattgattgtaaaacgtgtgtttgaacaatatgaaatcagtgcaccttgaaaaagaacagagtaacagcgatttttagggaacaagggaagataaccataaggtctgactgcctgtggggtcaggcaaaaaaagccctatttttcttcttgcagagagcctataaatggacgtgcaagtagggaagatatcgctaaattctttttctag

SEQ ID NO: 691 - DNA, 12044 bp, Homo Sapiens
gagcttcactggaggtgggtaagttttgtttcagacctgtagggctgaaagtgttgacgaacacctgggagaaaatgtccagtcaccgtcactgcaaatgcgggtccgaccttcaggagagggatttggactgaagatgtgggtaggagcaccctctcttagacaagaaaaattgagactaagaggagatgagatcgctgggggatcataattaagtaaaaacttgtatctctaaaatccgtcctgacattttcatttataggatatacatatgtatgtatctgttataatctgaaatgtgtccctcaaaattcatatttgaagccctaacctcctcatacctcagactgggactgtatttggagatgaggcctttaaaaagataattaaggtaaaacgaaggcattagaatgggctctaatccaatatgtcaggagtccttataggaagaggagatgaggacacagacacccacagagggaagacggtgtgaggacacagggagaggacaccatctgcaagcccaggagggaggcctcaggagaaaccaatcccgcccacacctggatgtggggcttccagcccccagcactgcgagggaataaagctccgttgtgtaagctgccgcatctgtggtattttattatggcagccccagctactaatacagtacccctaccgatacatacatatttacccacatgtagccacacacatgtgcacatatgtaatctttttgcctataaaaaagtaagcaatgcctaaaagtacaggtggagagaaggctaaaaagcacaggctcgaagagactgccaagatacaacgatccaacaaagacacatcgtatcaacagtaatgatttcctaaatgtgaaggtaatttggatggctggtttatagttttcatgcccgggagttttccaaggcacaatgtataccctttgcggcagcttactctcctgaaatgtgccttcatgaaattagataaacagggagaagatatgaagtacatctgcctaacaccacgttagaagaatccccgggcatttgcatcttatgcgatgatatgctggcaaaccttggccaacttccagtcttgtccttatgacaggggactgctgtgttgagttcccgtctcaggcctcacatccaccttggccctgccttgggagcctgtaggtgtgggcagaaaagagggacgctgccttcctggctgggcctttcttcacacacaggcacgaggacccaagctctaaaggatgaagtccccatggtctccgaagttttcattatcatccccctcctaaagctccaccttggaggcaatgcactgtaacaaaaggaccagcacagtgcccagcacacagaaagctatcaatcaatgtcagccttaaccattatgttggttgacttgccatccctcttcctcaactgcaaactatgtgagagaaagattcatgtaaccttggtattacacaactccatcgtggtgggttcagttgcatttgtcaaatgattcagagtaggacaacgggaattttctttacaacatcacagcattgtaaagtctttgctttgcacgaaagtgtgggactgaagaaatgattgtgcaggttgaaactgtgaagcaattttaagaagcaacaaggaaaattatgattgtttcataatcttcaaaaaatttttaaagtgttaagaactgttttactactggtcgtaaatgtataagaacatttaaagatagcaaattgaatacttatttagcctgtcataatttaaaaaatgagaaacattgagaaatagtgttttatttctttgtaaaagacttatggagagtaaattgaaaagggctttgccaccttctcattgtgaaacttacagtatggaccaggcatcttttctatgccttggcaaattgtcacattcctttctatatttggataggcttcctacattttgtcctgcacactttcagtgctgtgaaatatctccaagagtttctttaatatgaagtttttgccagcatctttatcctgagtccctcaaaagacacatccagaatctctcaaaagacaacagcatcaactttcccaccatcagctctttcttctctaaactcgtttacgtctgagtcaactttcacctcctgcattctcactttttgtttctttgctatactttcctcttcattggctacctacctctcttgagtattcatttctgtgaaatgtcacgtgggtttgtcactgggagccaagagagcagcacgaccacacgctttgctgtctgtgtgggaactgataacacggaaggactgaaggacgtgatgcggttaatcactgatcatgatgcacatctgttattacgtggtggtctgtggactgcagagcaagcagcagaggttgtcccccatgcaatcactcacagttaatggtgactgaaattggaaccatgttgttagggggctggtgttatttaacctcagttgccacagggcaatgaaaattcgtgcgtttgggaactatgcaaggtgaggactgcctgaatgttccataatgtgatgagtgcctcacaaacagggtgtatattatcactgagttttttcattattcttgaccttcaatatatagacattcttgttgatggtatcaggttgtttctgcgtgaatgagctttactcctctgagaaatggcattcctgaccctcctctttgaatcaattgcacaaaagtatctgaaggaaatttgcttacctgctgctttctatggaagctttcctgcagcatgacctagtgtctgtttctggttgatgattaaccatggggaacaagcgtttgagataaagaagttgcagaactttttagagaatgtaatatgttaatgtgcactgggactctccctgagctatatcaagtttcctggattctgaaatgctataattttaaaagtgtcataaggttaaaacagctttctaagaagtgcctttgttggaagaatacccaggaatggtgcgctggacagcttttgtacaagtcttgcattttctcagaactatctctcatcttggccatggcatcagtcacatcctgagtggctcaccttgacttgggttgcctcctactgcagttctcctaaactctggtgggggacacgggcacaacccacccaatactcgtatgtgctttacctggaaataaggagcagaggagctaggggaaggagccgatggctaaatgttcctgccttttttccctcaggcagacagttctaaggtgcacgctgtaggttgctgggacaaccctggcaagatcttcccccagacatccaccttggcggccgacttattaactcattggtctattgacttttgctccttgcctcgcccctgatccctgtgccctctttctaataagctacctgctggtgaggctctgccttgggggaaacccaggctgaggcaggtgggatgttataaccagggaggcctgagtcctgggtctttgcctggggtccccaaataggagagggattggaggaggtattgtgggggagagtgttgcaaaagcccagaggaaaggagtgctgttaccacaacagaggagacatgaacctgcacagaccaaaaacaggagagagagagggaaagagaaagagaagggggagaaagaaagggagagacagaggaagggagagatggggaaagaggagaggagaaagggagggagagaaagaaaggagatggagagagaaaagggtggggagagagataaagagagaggtaaagagagagagagaatcatctactacatgatttcttttttttttttttctgagatggagtttcgctcttgttgcccaggctggagtgcagtggcgtgatctcggctcactgcaacctccatctcccgggttcaagcgattctcctacctcagcttcctgagtagctgggattacaggtgcctgccaccacgcccagctaatttttgtatttttggtagagacggggtttcaccgtgttgaccaggctggtctcgaactcctgacctcaggtgatccgcccgcctcggcctcccaaagtgctgggattacaggtgtgagccaccgcgcctggccatgattttttttttaacctataaaagccttgagtagtgatggacgcgattcctagtaatgtggtttactaaagggtcaggctgtcagttcaccacaaatacgccacagtagtgtttggtattctctcaatgttccacccaccagagcatacaaaacagccacattccccaaacacttaattctcaaaacatacttgtagaggagggaagcctattactcccattagaaagatggaaaaccaaggtgaaatgattaactgagctaccagggcctcagaagaaagtcgctgctgagtttgggattgtgttttcaacttcctgcccactgtgggtgagctccaccttttactggaaccaactccaaggaggaagttttgctgggtttcctggaaggcagaggtttgcatctgcatgccctgcgtggaggcattgtatttgggggcaggcaggagaatactgtagctggtgtgcccacagaaagggagggagagaagccactgggagtgagctgggcttgggatcgggctgtgtcctcaccaactgtctgcccaggcatgaacttgccactgctgtggaagagtctgactgcatccaagaatgccaaaggttgtggctgaactcacttctcaacagacttggatcatgttcatatactattctttaaaagatcaccatttgtagtagaatgtcaaaaacccaaagatgttgctcccgatgttgagctgtaactattttctgtgttggtggaaaaatatgagagaattagttgccattcatgaatctcagtgatacacagacaaaagcatgcttcaattttgtttctttgtttttgagtggttctgatttattttcagcttttgggtgatgtctggggctgtttattgaggacgggataaatgggggggggaccaaaatatatttggcatttattggtggtgttttatatttgtgacttgatttacttcttatcacaacccagtgagacacgtactattatcatccttttaatagatgagcagcctggagcttagagaggttaggtagcatggacatcatcaggcaagttaaatgagaaagccgccacccattcccagctggggctgaccccagcgcctgtgttatttctgttgccctgagcctccccaggcttcttaacccacatgtactcctagcttccagcagtgctaatttacaccgtgtaccagctggagacattctggagtgtagactgacgcaataatccccaatgataggtttgccatgttttttttaaatgtgttttttcctactttttattatagatgtcagaattttctccttccctgagttatctttggacttagatgtatataaatgtatctggttggaggtggggggaaaagtggaagtggaagaccacaaaagtaaaaattacatttgagtgtatttcaccgattctaagaggaatgctttcttctgctccaaccactctgaaatctccgggtcccatactcccatcgcagctgtgtgacatggttgccgtggcctttgtgtgaacatcaaagctcagaggatgggtgtcagaggcttagatgaaaatcctgaagacaattgtctggcacttttcaaagctatacggcctcaccaaaaccctcctggaagctcttgatggctcgaggttcaacagtgtctgggaagacatggatataaaagatccagaatcaaagagtgattccaaagagttagaggctgactgtgaagtcttaggcatactgtaacccagtgatttacctatctttgcttttctgctcatgcagaagagtgatatatgatgaataaattctaagttcaattaggcctaaaagagctcttgtaatatgctttaaaaagtctaagtgataaaacattgtgacagatagagttctgtcagtgtttatattttcttagtccttcattaaataacagtgtgtcttacaccaaggcagttttggattccataaaatatggtagtagttatgtttcatgtttcaatagtcatcaatctgtttttaatgtattcatggaaaaatatgtgggccatcttgctatttaactatttttgaaatctcatggaagcctgccaatgtttttgcaatttagctaagaagctgtcttgctttttgagaggggaagttccaatattgtaagcctaggtttctgaatatatttttgttttttaataaatgtagaaagaatgttttttgttaatcctggcatttgtctagagcaaaagcaaaataaatgaaaagtgaggaaaattaaaaggctcacgttataacatgtgctgtctagagaataaaaactcatttgtgcaaagttggtatggcttttatgaaaatatttcagtccgagcaccttgcctgtttgctgcagtgctgactgactcatgattagggatctgtgttgcctttattgctctcggtttgccctatggcttgatttattaatatatttaaatatacaattttaaccttatcattggtgtgcaggtgtatttatttatactatctttgcttttagaaaaacactattatatcataaaaatattttaaccttaaattacttcccacaggcttcaagttttatgcagttcatatctgggcataaagagaaatcaatatactgtggcctgcagggcaccagcctttggtgtttgtcaaacgtttacagataactaatgtcccacataaaatagatccattctttccatcttgcacatcttgcacctttcttttttttttttttgtatgaccactgccgtgtagccatcatgtctggactgatagtagtttctaggcttggaggaaactgcattttcaagaaagcaggatgcagacatcccctgaggaacacctgcattaaacatagcctcccacctaaaaagagctccctgagttgggaagtgtcttattggcctctccttccggcctctcccactccctatgctgaaaccaagagcttcggggctcccctccctgcccaccctggcagggagcccagggccctcgttgctctccctgtctcctatgctgtccgagaacccctgcagctccaggccctggaccagccacagagtttacttctactgttgcaatactttgaagggagaagagtttcagcctttttgatcagtggggcttctacttaaaatccttccatggcaccccattatctcagggtaacgtccagactcctaaagtggcttccaaagtccttcattatctgatgggcctctgtgtactttctctctcttctctctccattcctggccctcctcatcaattctctggccattttgaacttgactcagtctccccaatgtgccaggctttccctggcttcccggctctgcgggaggatgagagtgggctcaactgtcttttgagggaatcctggaaacacacccaccctgagagtcattgttttgatggaagtgacattccaaaccaacatttggaaccaagtcctgtaagccagaacctgcacaggttttgttaaaggaatcaatttaggcctggcactgaactcctttctgctgtaagactcttttagaactttggaagtttctatgcaggggactgagccatcctgtccctgcctggttgggcatgagaagtcacttggaataggtctgagtgaatgctgatgaactccgacttagctctggtaaacagtgcaagttcccatgagactgcagggcaagaacagggcaggctgcacaccgcggggagaggcacacctcgttccgtcaagagacacctgggcctggtgcaggcgcattctccgtggttaacgggtgtgaaatcggcatttatcatcagtgacttttcattgtgtggcttctgtgagtccccaccttccttctaaacctcagcaggacactttcccttccctgtagttcaaatatgcgccgcaacctcagcttgatctcaagctttctattgccatgtaaacaatcagggagccctggaatggtgggctccaggggtgggtgggtcagggccacccccaggggtgcagagtctgaaggggctaaactccgggcggaggctggggggcctcaaaagcattttcatgcaggtgagaaaaggaaaatttccagggcatcttggctgaagcacagaagtgactcccggaagacctggcatgtgtgagatgtaggagggatgctctgtgcctgcttgtgtgtgtgcatgagtgcgtgtgtgtgtatgtgtgtatgcgtgtacatgtggtgggtatgatgagcctcggggctccctttagcatctgctggtgagtttactgtgcctgccgaccgtttcccaggtcaggcctccgcccatgataactactgtttaccaaacacttactgtaggtcagtgactcacatatgtgatctcatttcactctcccaacaaccctgacgtaaggactattatccctatttaacacatgaggaaagggaggtttgagagctctggttactttttcacattctgaagctaggtgcctccacagcacatgaaatgttctgccgtcgttcgtctccctgggaccatatggaaacgggggctgcttcccctggagatcacaaagggcttctgcagtagagaaaggagactaagagcacctttctagacttttccttagcattcttcaagatgtactatcagaagttcaataaaaacaacctaatgctgagattcatggatagaaaattgactcaacttcctgccttccgacgagcttattttcttcttagccattgtaaattggtggagccgtgttcctccttgtcttagaaacttttaatggtgctgttgccctcaggttaaggtctggactccttgtggctctccaaatccctcagagtccttcattgtctgagcaggcacactcatcttctgtagtttaaaaggtggcagtggctgggcgcagtggctcacgcctgtaatcccagcactttgggaggccgaggcaggcagatcacctgaagttgggagtttgagaccagcctgaccaacatggagaaaccccgtctctactaaaaatacaaaattagccaggcgtggtggcacatgcctgtaaccccagctacccgggaggctgaggcaggagaatcgcttgaacctgggaggcagaagttggggtgagctgatatcgctccattgcactccagtctgggcaacaagagcaaaactcactctcaaaaaaaaaaaaaagagtgacagtaatgacatgatcattaaacatctttcagggaagactctatgagaccgatgtttgcatgctaaagacaggtgttgctgccggaaagtgattcggtttgaggactcaggacttgggaacatcagtctcatctcaacagaacccttttttcagttccctgctgtttcctgcacaaactgggggaatgtgcttggcctccctggagctcggattgtctagcagcttggattgcttagtccccctttccacaccttcctgccaccctgagggggaggcctgatggttcatgggcttccgcagaaggaatttgcccactctgcttcctaaaatgtgcagctgcattttgctgctgggaaaatattgattgaaggtctggaggagtctgacaacttgtaaggcacatacagtttttatctgcaggatgaagttagtttttgtttgggcctggtgttttcgaaagaaggaaatcactttcataagcatcagattagatccaggaagcgtccgcaggacaatgagaagctgatagaggcagtgtctcaggattttgccattggttactaccgccacctcctggctgaaattgtgaactacacagcatgggcttcctgggcaaactggtttaagaaaaggtagccccgttttccccattttctgcaagttctgtgtggcgcaaaaaggaaatgagaagacttattgtttagatagagtatttattggcatattttatattaactgtgatgataaagcagacacaagaataagaaataaaatcagagtgaatttttctcatctgaggcaacagggaaaataattcattggaacaaccctgtgactcagtgttagctttgcccaaaataagtgtcaaggcccttatctgagtttccaagaccccctgcccattctcttaagctgacctcttagcatattgagggaaatctaccaaacattttggaaaattagtacaaaattaaggaattaaaatgaaaattgcaatataaaaaattattgggtctgaggcatgtcttcaggttgtacaaggaaaagatgtaagatttggtatctctcctcttcattattttatattggttttatacataagccctcaccctgtagaaatataagttctaagttaggaaaaggattatttgtaacatacatgcaatacacatacattgacagaaatagaaacaggctttttctgttatttaaatagtatttttggagtagattggtttttcgtttgtttgtttttgagacagagtcttgccctgtcgccaggctggagtgcagtggcgcgatctctgctccttgcaatattttcctcccgggttcaagtgattctcctgcctctgcctcccgaatagctgggactacaagcgtgtgccaccatacccagctaatttttgtatttttactagagacagggtttcaccatgttggtcaggatggtctctatctcctgacctcatgatccgcctgcctcggcctcccaaagtgctgggattacaggagtgagccactgtgcctggcggattgtatttttaaaaatttatttagagatggggtcttgctctgtcaagcaggttggatggagtgcagtggcgcgatcataactcactgcagccttgacttcctaagtcaagcaaccctcctccctcagcctttccagaggacagcagctggggccttcagacaattacgtttccttagtcggacatctgagaggcataatttcatggctaccacagaaactgagagcaaatattacatttctcatccccccttgaagcttgggtcttgctgaatattgttttcataaagcaatctgccatattgaaaaagccatgtaatgagaaactgtgtgcaacctccagccaacagctaggaaagaactgaggccctcagtcttctcaggtggcctactggccaatatgtacaagttgtatatacaacttccagaagggtccttaaaagaagagggctatcactttcttgccttcttttctttcttgctggctggaatgtgatgatatcactagatctgaaacagccattttggactaaaaggcagaagccacaggtgaggatgatggagttacaaaataaaagaagtccaagtcctagtgaactgggccaccatgaacttcccaggtttactggagagagaaataaacctctaacttgtgtatgtctctgcttgattttcagttacttataacagaactttatccaaactgaaaaaaattttacattttatatgtaaagtccgaagtttaacagagttagtatttcccagacgataaatcatgggaaaaataaaagtttaattacctaggactattactgggagatgatatttgctgcatatagtgaaggtgctagcaaatctcccctttttgttgctaagagggtgttccacttagttagccagggcaacagaaggaaaccattgatgttcctcacggagaagtctttgaaaacagcacatgagacagcagctaagagcgccccccaccgcattccaggctaatagcattggctccagaggctaacagggtttattgagtgaagggaccaagggggaaaccagcttgattttaattgtctgtctagtctgttggaaactaactttctctaaatgaatgctttttgaagttttcaaagctcgagaacataataaatattaccctttgctgggtt

SEQ ID NO: 692 - DNA, 2023 bp, Homo Sapiens
gggcggcggtctccgactcaagaccctggggctccgggtcttcttagcagccgccgcagcagccgcggcgacgtcactgtcctctcggcctggcacacagcgctccggccgccgaatgcccgtggacgcgcatctcttcccagagttcctgcttcctgggccagccaaagccgcaggtgagaacgtccgcggtagaggtgacacccagggcctgcgggtctcagaggcccggtggcctgctcctctcctccttgcccaagaaacccccacgggggcgcctgcagcggggacaccaagtgctccccggagccctgggagcacttcttctgaggcatggagcccctgctcaggtgcttctgaaagttcctttgtggaccccagaaacccctaggcaactgtctgccccgccccgcgcccccgccgccccccgcccccgcagtacccctccggcccccgacatccctgatgcgcatgcccaggggccctgtgagctagaaagtagctgagctggtgcagtacctgctggttaagaaccggaagacggtggcgatcaaaagggcagacatgctgaagtatgtcatcaaaaggtacaggagcttcctccctgagattttcaagaaagcctctgacctccccgagttagtctttgggttctatctgaaggaacttgatccagcagagcactcctatgtcttgatcagaaaaatcgatcctgccctggtttggggcctgacaggcgaccagggcacaccaaagacccggctcctgatgattactctggactcgatcttcatgcaggccagctgtgtccccgaggaggtggtctgggaggtgttgagggtgttggaggcacatttcgtctaaaaagcatttcgtctttggggagtccatgaagctcatcaccaaagctagtgtgcagcaggagtatctggtgcacaaataggtgtcccacagcaatcccacgctctaggtattcttgtgggggctctcaaaggaaacaagacagatggaagtcccggagtttgtggccaaagtgaatgacacccaccccagttcctttccgtggcagtaaatgaggcattgagagaagaggaggagataccccgtgcccgagatggcagctgccgttggtgacgtgacaagtgccagtgttagtgccagttccagttccagggcctatgccatggctgaagcaagcatcagcaccagcaccaatgcaagtgccagttgccagtgccagggctagagccatggctggagcaagtatcagtacctgggacagtgccagtgtggttgcaatctcaggctagtgtcagggactcctcctgccagcagtgaaggctggggctgagtcttcactttgttttgctgtgggtagtcaaaagggccccacagcagtgggtgctggggtcctgacttttcaagagtcgaggggtagagtggggttagggagaacctgccgcccatggtatctgtgttccagttctatttgtctttctcagtgatttagctttcaatttgcatactgcaaagttttgtttgccttaattaactttcttttataatgatgatcattttacaggaaataaactggttaaaactacatgatgacagaattatatcagagttgaaacaaacgccatacctaagcatttttttcaaaatcctttgttccatagacacttgattgagtacttaagttgaacatctaggtctatgaatgacgttggtcaaatgttttattgttctctgtttcggttttagcaggagagatttgctgtttcataaaagaaattgggagagtatatcattttatgcctgtaacttattatagcattggaataagctgttctttggaggtttgagagactttaccagtacaatcattccccccctcccccaaatataaaaagataaaataaaaagccggtcagtgtctgttgcacaaaattacaaccgctctctgcttgtatttgcctagttctccagaatgtagggaaaaataaaaattcaatgaattaga

SEQ ID NO: 693 - DNA, 1420 bp, Homo Sapiens
gtactgagtttaaaaataagctggggttatttatatctaatatgattttcacttaacaagaattactaaggtgctagaaaaaatatatgtatatataatatagtttatgaaatcttagttataaaatagcccttttttcctcctaaaaaattatattctcttcaacttggatgcaagactctattgtctatgcctttgaatactgcaattttagagtgttgattttgacattttattttaagggataagtgagcaatttttgttatcattaaaacttaaagaacttggatcttgtcacaaaaacatcaaataataggtaatttaagagtaaaatacaagagatttttgagagattgagagagccttagaatgtgaaagaaatgttaaaatagagttttcacttggtcatagtttcaaagaaataaaatcagttcttaggacttaatgattttctaatataggaagtcaaaagtatgtaaaattttatgaggaaacaagctaatatctacttcagttttcatttaaaaatatttttaaatagagacgtgatctcaccaacttcaattttcataaagtacaattttcataaatctttttcaaatagccagtggacatttttaaagcattaatgggaaaatgtctagctcttttatttatttatagttacattggtaaagcttttatcaagaagtaatactgagtttaccattttgaatagactctgtatttgcttttgaaagaagtagtgagagaattgtagatattgaataacaaactccagctgcctaactgaaaaactaaattccttatagactatcgtaaagaatccacaaaaaacctattagaggtaataaatgaatttggcagttgcaggtactagatcaacaggcaaaaaccagttgcatttttatactgtagcaacaagtggcctgaaaaatgcagttaagagatcaatttcatttacaatagcatcaaaagtcataaaacacttaagaataaatttagccaaggagctgcaagatttgtatgctgaaaactgtaaaacattgctgaaagaaatcaaagtaaacctacacacattgaaagatattccaggttcatagaatggaatactaaatactgttaagatgtaggtatcacccaaagcaatatgtagattcagtgcaatccctatcaaaatgtcagtggtctttgttgtaaagagggaaaaggttatcctaaaattaatatggaattacaagaggctctgaatagccaaaacagtctgaaaaagaacaaagttgtaagactcagactttccaattttaaaaataaattggactacatcaaaaacaaaaactttcgtacatcaaataacatatcaagaatgtgaaaaaagggctggacgcagtggctgatgcctgtaatctcagcactttgg

SEQ ID NO: 694 - DNA, 6026 bp, Homo Sapiens
tagatgatcggaaagaacaaatggtgcatgtgtgcgcgaacgagccccagtttctctccatccaggtccccagcggactcagagcggccgccgcactccacggcctgggaggacagaggccccgcagcctcccaacctcggctcatgtggggggcgcgccgcgcagggtgggcgagtccccaggccccagagtctgccggagccagggtgcgcggtgcggcggctgacaaagagcctgggaacttggagcttgtgagttttatggtcccagctcactccaacaccgaagccctctgaggctgttcagggccggggttcccaggcctaccaggagtttccctctgatgcctgctaggggctttccgtgagcaggcctggccatgcccacacatgatgaggagacccgacttttcacccagaggttgcaacctggcagctcacaggttggattcattctgcaaatgtgttttgttggatccacatagtgtttccaaacattctgaatcattattttaaaaatcaggaatatttaaagtctggatctctagcttctgtttcaaaagtcagaccatctggcaatactgtacctgcattccacatgacaattggtgacgggaagccctgtgaacctggggaggctatgaacacatctgcggatgatcctcaatcagaaagcagaccatgagaaagggcagcacacggatgcctgctcctgctctgctcacctgtgcctctttgtgcagctggatctgccagcctatttgaatctaatccccgttcaatatttgcatttttgtgaatacccctccctttgattctttgcaaaggggcttgaacttgattgactgagaccgtggagcaatgtatgcaccaggacactatcacaaacaatagagcaaccaacaggcaattagtagagtctaatagctggatgagatatcaagagacatagagatagacagcttacagacagatcaggtaaacaaacagtgaaagagaatcctgctaaaaccactgttatcccatgatgactatgtacgtgctcaaggctgtgctttctaaggagcaacatcagtgcctttacactgcaggaaaagtggacttcacccagatgggccagtcaaattactaaacagataaacaacaaagaacaacaatctccagagacaggggcttcagggaaaatcagtattctgagtggctatagtatattatctaaaatgtcaaattttcgacaaaaaatcatgaggcacacaaataaacatgacagggaaactcatacatgggaggtaaaagcagataacacaaactgtcagagggcccaaacacaagacttaacaaagataatcatcacaaatatatccaaaaaactgaaggcaaccatgcttaaggaagtaagagaagagatgatgatgctgtctcattaaatagagaatatcaataaagagacagaaatgattaaaaagattcgaatggaaattctggagttgaaaagtataataaccaaagtagaaaattcactagaggagttcaacagaaggtttgaactgccagaaaaaaagaatcagcaaacatgaagatatattaatagagactgtgaaataaaaaacagagagataaaaaatgaagaaaaatgaacaaaacctcaaagaaatgtgggacaccataaagtgtacagatatacatgatgattatataagaagaagagggagaggaaagagcagaaaaaatatttgaataagtaatggctgaaatgtatcacatttgataaaaaattaatatacatatccaagaaccccaacaaactccaagtaggattaatgcaaacaaatccatgcccagacacatcatattaaaaatgttaaccctccaaaacattaacagttgacttctcatcagaaatagtgccatccagaaggcaatgggattccatattcaaagtgctaaaagaaaaaatccaaccaagaatcttatatccagaaaatcaatccttcaaaaaagagggtataataaaaatattcccagataaacaaaaactaagagattttattgctggaagacctatctcacaagaatactcaagggaaaaattttcaggttgacaagtgaccccagatggaattttgagtttacataaaaaacaaagggcatcagtaaaggtaagcatgtaattataaaagacgtggatgtaattataaaataaatggatatttattctttcttctcttaacctatttgaaaagcagtggtataaaacaatatgtatttaattgtattgttgagccaaaacatatagaaatgtaatatatttgacaagaacagtatcaaggatgtgaatgtgaacaaagctgtatttgtgtaagacaataacaccagatggcaactggaatgtacaggaacaaatgaagagggctataaatggtaaataataaggttaatgtaacaaacttcataattataaacttgttctcctttcttctcttctttaaaagacataaaattatgtaatgcaataagtataactgtaccattgggtttgttatatatatatatgtatatgtgctattattgttatatatatatatataatagcataaaaaaggatggaaaggtatagagctatgtagaagcaacacttctatatcttattgaaattaagttactataaatctgaagttgattctaagttaaggtgtatatgataaaccatgtaaaagccactaagaaaataactcagaaatacagtgaaaaattattaaagcaattaaaatattacacaagaaaatatttacttaatgcaaaagaagcagtaaaggagaaatagatgaacaaaaaagacatgagatatgtgatatgtagaaaacaaagagcaaaatgacagacataagtccaactttatttatttatttgtttttttaattatactttaagttctagggtacatgtgcaccacgtgcaggtttgttacatatgtatacatgcgccatgttggtgtgctgcacccatttgtccaactttaaaaaataacattaaatgtaaatggattaaacaatccaacaaaaaggttgatattttcagactgaataaaaaaataagacctaactataagctgtgtgtaggagacacactttagaactaacaatacaaataagtaaaaagtaaaaagatgaaaaaacatttatcatgcgaacagtaaccataagaaagaagtggcagctctgctgatatcagacactgtaaaacaaaaaatgttactaaaggcaaatacaaacatttaaattgatcaaatttatcagaaaaatgtaataattataaacacatatgtacctaataatagagcctcctaaaaacatgaagcaaaaacagaaatgaaaggaaaaatagacaattcaacaataatagttggagacttcaatatcccactttcagtaatggctagaacaacaaagcagaaggaagtagaagaagcaaggaagtagaagacttgagcaacaccataaatcaactaggtctttgaaatacacatttcacccaagagcaagatacacgttcttctcgaatgcacatggaacatttgccataagagaccatatgccaggcagtaaaacaagcctcaagaaatttttttaaaaaactaaaatcctataaagtatgttctctgactacaatagaatgaaactagaactcaataacagaaagtttgggaaatttacaaatatgtggaaattaaaaacacatccctatgtaaccaatacatcaataaagaaatcacaggggaaattacaaaacacttagaggcgagtgaaaatgaagatataagatgttgaaacttacgggatgcagctaacgcggtgtctagagggtattcaatagctgttaatacctctgttaaaaaagaagaaagattttaaatcactagcctagttttccaccttaagacactgaaaaaaggagagtaaattcaatctaaaacaagcaaaaggaagaaagtaatagagattaggtcggctattaacgaaccagaagaaaaacaacagagaaagtgaacaaaaccaaaagttgtttctgtgaaaagatcatcaaaattgacaattagctagactgaccaagaaaaagaagactcaaattactaacatcaggaataaaaaagatgacaattctattgacctcacagacataagaaggattataagggaatactataaacatttatatgctaataaattcaaaaaacttagacgaaatgaacatgtttctaggaaactcaaactactaaaactgaatcaagaagaaatagataacctaaatagacccgtgaaaatgaagaggttgaattagcagtttgaaaacttcccacgaaaatggcctaggcccaaaagccttcactttttaattctccaaacatttaaaatagagttaatacaaattatttttttttttaaagaaaaagaataggagggaacagttaccaaggtattctttgaggtcagtattacccagataccaaaaccaaacaaagacatcataaaagaaaggaaaaaaaaataggaaatagccttaaaagggcaaatccaagtgttgttggccttgaagaggtggtagagagacaggagcagaacgtttattcaaagtgataataacggaggactttccaaacctagagaaagatattaatatccaagtaaaagaaggttctagaccacctagcagatttaacccgaagaagacgacctcaaggcatctaataattcaatcatgaaggtaaaggataaagaaagtttccaaaaagcagcaagggataagaaacaaacaacatacaatggagctccaatacatctggcagcagacttttcactgaaaaccttacaggccaggagagagtgacataacatattgaaagtgcctaaggaaaaaaacttttaccctagattagtatatccagtgaaaatatctttcagacacgaaggagaagtaaaggctttcccagacaaacaaaagcagagggatctcaataccagatctgtcctacaaataatgccaaagggagttctttaatctgaaagaaaataacattaatgagcaataagatgtcatctgaaggtacagaactcactagtaatagcacacagaaaaacacagaatattataaaactgtaattgtggtgtgtaaattactcatattttaagtagaaagatgataagataaactgatcagaaaaaataactacatcaacttttcaagacatagtgcaataagatataaataaaaacaacaaaaagttaaaaagtctgggtgtagtggcttacgtctataatcacagcactttgggaggccaaagcaggcaaatcgcttgagcccaggagttcaagaccagcctgggcaacatggtgaaactctgtttctacaaaaaattataaaaaaatttagctgggtgtggtgatgtgtgcctgtagtctcagctactcgggaggctgaggtgcgagaatcacttgagcccaggaagtcaaagctgcagtgagctgtgattgtctgcactccagccagggcaacagagtgagatactgtctcacaaaaagaaaaaggtaaaaagaagggagacaaagttgaagtatagagtttttattagttttctttttacttgtttgtttatgcaatcggtgttgtcatcagtttaaaataatggattataagatattatttgcaagtctatggtaatctcaaatctaaaaacatacaactggtacataaaaataaggagcaagaaaagaaacaattccagttacaaagaagaacaaactagaaggattcacactttcttttcttttttcttttgagatggagtcttgctcttgtcgcccaggttggagtgtaatggcacgatcctgactcaccgcaacctccgcctcccgggttcaagtgattctcctgcctcagccttccgagcagctgggattacaggcctgtgccaccatgcccagctaattttgtatttttagtagagatgaggtttctccatgttggtcag

SEQ ID NO: 695 - DNA, 2431 bp, Homo Sapiens
aattggcaacctaaagttataagttagatgtattttgcttttcaagccatcttctgagccttttttaggctgaaatgatttgtttatttcccaaattattgctagctacttgattttttatggctacctaacatccacatttggtagatacttttcctctctgcatgcatcccaaagaagaatttgctatttgtggaagaagagaataagggtatcagaatgaaggaaattacagtgactacactgtttatgactccattttgtgaattcttaaatatgctatggatttttttttagaaaaaataatgcaaaaattgggatattacagaatcaccataaagatgatcaacaagtaataagtcttttcatggagttcatttttcttttaaattcatgatttggccacaaaaatatatatataagtgtctgatatatgataacagcccagtttctcggccactcatttgcattatcttaaatcacaaataattacttaatttgctggagtgtgtgctttgcaacttttgtaccagagcaaaatttgtatttaaaacaaaaaataagaatgcccatcactaggagaaacactcctcacagaaaacacacacacacacacacacacaatttaaaaactgagtaaatttaaatgtatgaaagtaccccacaaattgatttcaacaaataaatttcatttctctagctacttatgtctggccttattttgagcgttacaattttattgccttcatttgcctatttagactgatgtagtttgatatgatgaagttgtgaataaaagccttgtgttcattatttatatatactacctggtatgctatggactgtgtctgctgtagtgctattccctaatgagcaactaagagaagacacaacaataaaccatggaagtgttgggaggccatggaaatgatttagaggtataaaatattcccaagtttttattataaatttttattcataggttaaaacatataagcataagtgattgtacaggtgtgactcccttttctaggagagaaaatagctttatttgaaaactccaaaagctacttaatcttaccagaggtttttaataggggaactgggtttacttacaatgaaagcatattttcattctgctatagaaaaacatatccctgctcattcagtaaatctaagattggaatgctttctagaactatgcaatatttgaataatttctagaaatgtctaagaaacaaccttttttattttaaatcatcacttacaaacgtagtctgagactgcaaactagttttcacttgactaatccatcattatagattagttaccatttgctctatataatctattgaagaaactattgttattcatattttgattaattttactagcaacaaatttttattttagtagcattgcatttaccttaaatatgtaaaaatgaagttgtaacaggatcaaatatggaaatggcaatggtaactctgcctagaacatagttgaatgtccttggttgtcggtaagatgcaaagatctatacaaattttatcataggtcaaaattatttctaaatatacaaacagtttcaactatttctttctccctaaaactaaaaccaaaccaaacccaaatgaagaaacctaaacttcttttcatctaatagttatacccaactagataatagtagcttctagacatcaataaaaagatttcattttaactgtctttttaatttgtaaaatatatgagtatggaattttgtatctaacttgaaatttcagatgttttaataatccaaatacgttcttctttagcatgtcaaagtactaatagttaaaaaatttctttagatttaagcatatacattacttgactttttcaaaagtatcaaaaaattgatagctgcagaaatgccattatttgattttctaaaaaacattgattcattcttaaatgtgtattctttaaaaaatagtaaatacctcaagagtgacagaaaactttccttttctgttctgtaatgctaatttaaactttgagtcttagtttacatggtcataggggttaaataaaatgtataactgtacaattaattgtgttcttgtgacctgatgattttttgaaaatttgcttttctctttaagaaatttaagttttcaagggccgtattagttatctaaatattttgggctaatgttgacttataaataaataaaaatttagaaatatattcatgatgacaattttgttacttacactgcctattctttatttcttttttagttcaaaggtgaaattttgacctttgtattaacaaagcctcaagaaaagagaaattctgccttttaaacattggttttccttgcattttatggtggtgtgattttgcctcagcaataataaaacataaaatatgttgttgcatcaa

SEQ ID NO: 696 - DNA, 1686 bp, Homo Sapiens
gaatcaatgggaaaataaaaaggaaaatccagacattaaagcagcatttcatgtcatcaacatgggtggcttctccaccttcctcaaagtagaatagcaaacttttaagttcccaaggtgtttacctacttagccacacataccatgggcccacttctcagtggctttgatatacctagcatggtctaaagaagtgtcagactaactcatcttacaaaaggaaccgcttaataataaaagagctgtgcaagtagcttgtttcatcttaattagcccaagatgatgcttctgaagtgctgtgctttcttatctatccttcctgctgcaagggaagaagactttgacatctttaacaactcagcctcaggaaccagaatcaggagtagcagatcttgcattggcattgtcaaagaagctgtaaaaatgggtgcctaaaataaatttgcctttgtattggaataagctgtcatgtgcaatgtgagagggctgggataagctatcatgtgcagtgtgagatagcttactgtccagtgtgagatagctggaacaagctatcatgtgcagtgtgagagggctggaaagtgacttttagcatctgtgttcaacagtggaaatcacacatctactgtgtgataggaggatgccagaccctggaggggagaaaaatacagtgcctctgccatcagagaatctatgttgactgcattagaaggaaaagggaagcaatggttgaaagtgaaaatgtagatgatgatatttttactttagaaatgcattagtcacttgtaagaagtctgcccacctcttttcaattattgcttgagaccaatgttagtcaacaggttagattcagaaagcttcagaggtctctctttagtattttgtttccacctggcaccagcaacagtgtcctcagtggccttgagtgtttgcgcaaccagaaaataggagtggaaatgccccccgctgcaattgaatcagcatcccatgtaacctgccagctgggtagccaccccgagcctctgccattaacttcatttacacattgttctcactcagccactcacaggaaggcatctttatgaaagcactgcaaacactatgtgtgaaaaaatccagatggtataaatagcttttcacttctaattgcaacttgcccctcacattttgtttcctgagagctctgaaaagagaccgatccaaaccactaatagcacaggagctctgggagggtgagtcagtgtctactgctgaaggagaacaaagatgaagagagaacggcaggagtcccagaaggccatttcaggcttgaaggagtacttttctgcagggtagtgcccagccagacaaacagggaatggtttcctggagtacctgataggtcagctctttgatgcatcgctcaagtctgcgggctcccctctgggcctctgcactgcgacggatttcaccctccagttcaccttccagttcacgaacctgcaaccaaaacgtgacctcagaccagacgctgccaccaagtctggcattctatttgctgattggcacaatcatttgaaagacagcaaagtgtcaagggaacatgcacacactgtttttggtgcttaaacaggacagtgtctctgggaaaactctctcgccaaaagtaagatcttttatggattcataaaagaactatttagactg

SEQ ID NO: 697 - DNA, 2213 bp, Homo Sapiens
aggggaaagtccctttcacaactccctagaagcagaatgtcctaagaattttatggcattacctacttccaattctgctcagatttatagtacatattttttatcaccctgacaatttcttagtgcctagagagtactgatgttcttcagcagctggaacatgatctgtcttcaaccagaaatgatatgtgattggttccttcatcaagcccaaagccaaaggaatccagcccataacctctgatggtagtttcttttgctgtgcagaagctctttagtttaattagatcccatttgtcaattttggcttttgttgccattgcttttggtgttttagacatgaagtccttgcccatgcctatgtcctgaatggtaatgcctaggttttcttctagggtttttatggttttaggtctaacgtttaagtctttaatccatcttgaattaatttattgacacttctgctcacaggcatgttccagctcataccctatgccccttccttatttggaaatgttattgcttcctatggtgaccagaatgtgtggcatttgagccatcagcccctttccctgcagccctcccagctctcatggaagctgccctggggactccagtccattggatgcagtgaaaaatcgaggctccttctgtctccatctcccagctgggaatatgtctgcactgcaagaggagcagcatgccaatgcttctgtttgcctctgccccatgttgcctgcaatgcggacatattcccagctaggagatggagacagaagaagccccgatttttcactgcatccaatggactggagtccccagggcagcttccatgagagctgggagggctgcagggaaaggggctgatggttcaaatgccacacattctggttaccgttaccaaatacagtaaatattgtttaatgaatatttctccatttgctgtatgtccttagaacagtttccacagactttttaaaaatcatttactccagtgaaatcattgctttgctgctgagaattctgttgcactcttctctcttcccatctggaaccccattacaacagatgaatggataaagaaaacgtggtgtatggacccagtggaatgccatgcagccatagagaagaaggaaagcctgtcatttactacaacatggatggatctggaggactttacgttaagtgaaatcagccagttacaggatgacaaatattgcatgatttcactcacacatggaatcttctaaaaaatgatattatagaagcagagagtaaaatagtggttaccagacactgggaaggggaggagatggggaggaggaggagaggttaatcagctcagctctggctctgggaatcctgtctgcagtggccaacggggtcaaggggcgagtgcctgtgggtgtgagtttgtgtgcggcacctaggggttggctcatggggcatgtgtgggtcctttgtggggagtacaggggctggttggctgggggctggtgtaagacctagcagtgtttaggtaattccttacctaagtccatgtttgcccaagactagggaggacagaggaagcttgtgttgctgatatcttaacctcagccagtgctcatcaaggccaccctgcaagctcctatttcccaaatgtcttcatctgtaagggctgccatagcaaagccccatggacagggagccttcttaaacaacacaaactcttcctcacaattctggaggctggaagtccagggtcaaagtgtcagtagggttgcatcccctgaggcctctctccttggtttacaaatggctgtcttctcccgtgtcctcatgtggtcttccctctgtgtctgtccatgtcctcatctcctctcttatgaggatactagcaagattgcattaggacccaccctcctgaactcattttactttagtcacctcttgaaaggccctgtctccaaacagtcacattctgaggttctggaggttactactttaacatatggatttaggtggagcaaaactcagcccataacactaactttcctgataacctgaagccctgagaagttgccacttgtcagccttctgctcttgaccagggcctgccatctctgcagctgcctcccctgcctctaccccagtccccatctgggggctccatggaaacagctgcaccattaacccctgacatagccccaaatctttcactgcacagacca

SEQ ID NO: 698 - DNA, 3151 bp, Homo Sapiens
aaatattattagtatagtgttcaatcaagtaggaaggggtttagaaaatgcaacaagttgataaaaatgattgactttttatttctttttagaattcctgactcttatcataactgtgcattttgaaattgatgttctaacaaccaatagtggttaaaatatactatccacttaattacattcaattatggttatagtagcatgtctcattcaaagaaccagatctacatggatgcatacttaaaacttatttatcaatttacttcacatattcttcccaataacatccttctgtcctgtgtccctttttccttcctcctgtccctccccccttcttcctttcattcctccttccttcctcccatttctcttccttcctttctcctgtcctgcctccctctttccttccttcattgcaaatgccttatcctagactgtggctttttttttttattttttttaatggagtttttccatgaacagaagttcttcatattaataaagtataaatcgtctttttttattttattatcatatttgctttttctgtatatgtcctgtttaagaaatcttggcctaccccaaggacataaagataatttcctatgttttattcctgaagctttattattttactctccacaattcgtcctaagacatttaaaaaaataatgtttgcattaattattaattcattctaagacatatttaaaaataattatgtgatgaaagggccaagacttatttttccccactataatgttatactgataatataatatgatagtggccatttgtgtctttttcccaaccatcagaggacaaatatttgataatttaccaataagaattatgtttcctgttcatgttttatagatttttcttatgggattgagaatgttctatttttttttaagttatcctagggcagtgaagtctgtctcaaagattttggcatatatttacttaatcatatccatttttttcttcttttttcttattttgaattaatcaaatattttttcccatttactctcctctgttatctcttaaattttacatagtcttgtattaccttttttagggtttaccatagaagtttcaatatgcatctttaaattattgcagcctaacttaagttttgcttttgttatgttttgaacaatatctcataatttacccatgccctttttttctaatcttattatgttcttttatatatgtcagtctcccacagaatagtattattttgtgtataacactcattattcttgtatatttgcccacatatttgttctttctggtaaattttattttttcagcagtaccatactcacatctagaatcagttgagtccaggaaagaattttcattttctaattattattattactatcatgtttcttataggatgaattcactcaatgtttgcctgaaagcatttcattacatatttttactctaaattagctgtattgagagacaatacaaatccaataatattcaccaattttaagtggaatcagaacacataatttttccatcacctcccaaaatacccttgtgtggtttttgagtcagtctcctcctttttggctcagtcctttgcagtcactgatctactttttgtaagtatagtattttactagaattctgtatagtcacattcattgaacacaatgcatttgagagtcatttatattgctgtgtacaacagtactttagtcctgtttattgctgactagtattttgatataggggtataccacaatttattcattcattcaccagtgaaataaaatttgggttttttttgtttttgttcattattaataaagttgctatgagcatttatgaataaatactttttattacatgcttttaattcttttggaaaagcacttaaaagtgaaattgcttggccatttggtaggtataaagttgtataaaaagagcaaaatatttccccactggctataccattttacatccccatgagaaatttataagaattacagctgctctttatcctcatcaaaattagtattgccggtctttttactttagccattctagtgactgaagacaggtattctatagtggttttaattgaattttacctaataattgataattttgagcattttttgttatgaccattttcaattcctatattctttttgatgcactattaaaaactttaccttttaaaaatttgattatgtgtcttatgaatattgtgatataacagattttaaatatattctgaacacaaattcttgttcagatatatatttgcaagtggtttccagtttgtggcttcccttttctttttctaatggtgtctttgaaaaggcaaaaaaaattgatgaaatgtaatttattgatttataactttataatttgtggttgcctaattcaaggtcataaagatattttttctagaaattttataggttaagctcttacatttaggtgtattattcacttctagttaatttatatgaatggtgagaagtggatgatatttatttttccaaatggttatctatcttttctaagacaatatgttaaaaactatatcatttcttattgtattacactgatatttttgccaaagatttattgattatatatatgtgggtatatttatagactcttcattatgttcagttaatttatatatgtattcttataccaataccacgctgtcctaattactaattttagagtaatgcttaaagttatatattagaaagcctccaaatttgttgttaattttaaatgttgatttggctattctagattcttcatttacatgtaatttaaaaaatcaactaaccaatttctacaaaagggtttgctagacttttggttggaattacattaaatatatagatccatttggaaaggctagatatattatcaatattgaatcctatgctttgttaaattcttgagtattttataattttaggctactatatatgatacttctaaaacttttaatttctaaatatttatcatatatataaatgcaattgattttcatatattgactgctatcatttgaatgttccctccaaaacttatgttgaaatttaaatgccattgtactagtctaaagaggtgggatcattaagacctgatt

SEQ ID NO: 699 - DNA, 28468 bp, Homo Sapiens
agcagcgcgagaccctcgccaggctctgaagacgcggcctggccctggccgttcggcccttcgtctgagcgcaaaggctccagcacctccgcggccgaagccgcgggacttttcgtggaaaatgggacccagcccgatcgccagcggcgctgcagcggactctgcgggaacctagcttctgctccaggacctccagggccaccccagctcgcagggcgttcgcagcggctcagggcgaatcacgctcatggtccccgtgcgcattttcagccccagccggtacctccttactcgccctcacgacattcattccaccccctaaaggtcctgccaaccccaggctcttcccgagcattcccgcccttcctcccttttgaaaccggagcaaatcacggccgggcggaagcgggggagcccgggtgagagtcagtgactcagctgcggactccaagtgtcgccggaggccctggggcgcaggcccagcgggctgtcgcacagctcggctgtcctgtgccccttcctgacgaggctggggaggaaaggcggcccagagaaggccggaccagctctccccgtcagccccaggctctcgaatgacagcggatgccagcgaccggggatggggtcccggaattgctgggttaaacaagctccggattcaggcctgggcctgggctggggttccagggttctggaccgccctcaaagaaggagctccctggggcggcacctggctctgcttgatagccccagggacagggagctcactacctatcagggcagctcccccagtgccgagaccagctcggtcctggagaccctaacccagcggtgctagaggaattaaagatacacacagaaatatagaggtgtggagtgggaaatcaggcgtctcacagccttcagagctgagagcctccaacagagatttacccacgtgtttattcacagcaagccagtgataagcacagtttctacagattatagattaaaagtaccccttagggaaacaaagggatgggccaaaataaaggggtgggtttggctagttatctgcagcaggggcatgtccttaagtcacagatggctcatgctattgtttgtggtttaagaacgcctttaagcggttttctgccctgggtgggccaggtgttccttgcccttattccggtaaacccacaacctcccagcgtgggcatcatggccatcatgaacatgttacagtgctgcagagattttgtttatggccagattttgggggcctattcccaacaccctagcattgctcacacttgtccctgaagtgtcaccttgtcgtagctgggctctgagccctctgccccagggaggggtggccttttgggctgaagggactgaggacatagccgttgagcctgttggccattgctcaaagaatgcagcctcctggtcacccatgttgtccccttgccaacaaaaagagtgaaacactgtgcaatgtttgaagagatttattctgagccaaatctaagtgactgtggcctgtcacacggcctcagaagatcctgagaacttgtacccagagtggtcagcctgcaactgggttttacaaattttagggagacataagacatcaatgaatacttgcaggatggacattggtttggtccagaaaggtggggacaactggaagtgacagagggacttctaggtcataggcagattcaaagattttctgattggcaattgattgaaagagttaagttgaccgggcatggtgggccatttctataatccttgccatggggaggctgaggaccatttgagcccaggagttagataccagcttgggcaacatagagagacctcacttctccaaaaaaaaaaaaaaaaaaaaagttattttttaaagacttagcattaatagaaaggaatgtctggttaagataaggggtcgtggagaccagtgtttcatgatcagatgaagcctccaggtagcaggcttcagagagaatagattgtaaatgtttctcatcagacttaaagagtctgttctctcagtctttaaggggtgtgttgatgttactgctggtcagctgggcctgaaatccaaagggaggagggtacagtgaggcatatccaacacccatttcctgtcgtggtctgaactagtgtttcaggttaaccctggactgcccttggtcaagagcaggggtgcattcagatggtgggggtgcttagaatttcatttttggtttacaccactgtgtcctctcctgccaggggagggacccagagctggaggcttagccctggagataccggtgaagatggatgaatgagaaaccagttggagcttccaaggtctctacccaccctccagacctcctctgctcctgcccctgcccattcattcccaacttctgctctcccagctcccctcccacccacatgctgttccctcctcttccatcttccgcttcctgggcccagagactgggcaagatccccagggctctccttgcacagcgaacctctcccagggtgcatagccttgctgcaatcttacacagggaatacataagcaaggaatacttctgtccctcttggactctgaagccagaaggccagggcctggttggcctcctaactgctgtgtcccagggccagagcagtgccagacacccagcagtcttagcacccacgaaagctggagggacccacaccttccccatcactcagttgcatcagtctaacgcaatggatttgggcagcttgtggtggttcactggcagtttattgggggacttgaaggagtcaaggtcaagtgggggacttctgggtgccagacctggcccttccttggcctgggcttggggtgtccaagcccacagagccatgcagggggaaagagctaggcaagcagggtggttgaggaggtcattagcgtggcctcgagggaaaacaattccaagaggagcccaaattcgaatgtcccctggtgtcattgagaatggagagatttaggttatgaattgtgcagttggtgggtagcaagccagggtcctgaagatagtctgcatatcccctggtgtcattgagaatggagaggttcaggttatgaattgtgcagttgggggtatcaagccagggtcctgaagatagtctgcatatcccctggtatatatcatttatataaggatgttacttaactattgctgtcttccagaggcagcttcttgaacaaatacttgaggtcctctataggtttacgggagtagactgttttctccaagcaggcctgtcgtccatcaggagaagcaaaaggttttattctagagacaagtccttccaactgtacagctgatggagtagccaaggaaacctggacaggaggtagcttctgacctttgggagccagaagggccagtaaatggattctcttctcggaggtactgagacttatattgcatcccctggagggaaactgaggctcccaggttggataataaatcataacctattaaaggaaggggacactcagggatatataggaaagaatgagtaatacccttaaatccaatttcacaagtcaaaggaaaggcaaatcattttaccttctcctggccatctattcccatcaccatacagttggcattgcagaggtcccacaggttgggtcaggacagagtaggtggtcccagtatccaatagttattcaggtttcctgcctgctacattgagagtgacctgaggctttgcggtggtgatgccaacagaacgcttcaagactgcagctgggagagcacttgggctacatccagcagagagggtggccttttcatacaagagactagcatcaagaggagtgggttggggagattcatgctgtcatgacttcacaggatggaatgaacagtcccttttccagtgcccctctttcttataataagaacattggttgtccctcagtcctattgctgctggttgaggtctggtcaccccttgtctggagtgtttctcctgcctagggtcaccttgaggcagacctgtaattatggcagccaaaatttttgcccgatttttcattctctcatcctttttttcctcccctgcctggtccttattgttaaaaaccttaaaggcctccgctatccacgtcacctgaggtgtcttggggtaagcttccagtttctgaacctttctccaaatgtcgggtggaacttgagttatgaaatgcatggtagttgtatgttcatttttataagaaactgtcaaactgttttccatagtggctgtaccattttaaattttcaccagctgtgtatgagtgatccagttactctgcatccttttcaggatttggtgttgtcactattttttattctagccattctcataggtatgtggtgatatctcattgtggcttaaatttgcattttataaaggataaggatggcctgggcgcagtggctcacgtctgtaatcccagcactttgggaggctgaggcgggtggatcacgaggtcaggagattgataccatggtgaaaccccatctctactaaaaatacaaaaaaaattagccaggcgcagtggcgggcgcctgtagtcccagctacacaggaggctgaggcaggagaatggcgtgaacccaggaggcggagcttgtagtgagctgagatcgcgccactgcactccagcctgggcgacagagtgagactctgtctcaaaaaaaaaaaaaaaaggataaggatgttgattattttttaatgtgcttatttgccactcacatctgcttgctgacaaaatgtctgtttatatgccttgtccatgttctcattgattttttttttttactgttgagttttaagagttctttgtatattttagataaaactctttgtcagattgtggcttgtaaatattttctcttagtctgtagcttgtcttttcatcctaataacagagtcaatagcaaagcaaaagtcttaatgttggtgaggtccagtttatcaattgttccttctatggattcagcttttggtgtcaattttaagaactttttacctagccctagatggtatctttttatgttttttagtctagagatgtcatctttttattcctgatattgataatttgtgccttcttactcatgatcaatctttctaaggatttataagttttattagttttttcaaataagcaaccttttatttttattttttgatgaattttctattagtttgaatttcttctttctgtggatatatttgctattctttttctaatttcttgaagtagatactcagttctctgtctttaagaatttttcccatgaatggattattttagaccacaagtttctcttaagcatatctttgtcactataccgcaagtaataataggtcatgtaaacagtataattcttttttggagaaacagtgtaattatttttggacactatgtcatgcaggttggagtgcagtggcatgaccatggctcactgcagccttaaccttctgggctcaggtgatcctcccacctccacctccatagcagctgggactacaggtgggcactaccacaccttgccagttgttaaaattttctgtagagacgggttctcactatgttgcccaggctgctaactcatgggctcaagcaaccttcccacctcaccctcccaaagtgctggaattactggcatgagtcactgtaccttgcctcagtataatttaatacaaatattttccaacttcctttgtgactgtcttctgagacttagaatatgcataaatttatttcttatcttccaaacctttggggatattttattttttgatatcggtgttttatttaattgcattatggtcaaaaacttgccacacgatttcaagtcattgacattgtggagatttgctttatccccagcatatggacaaaaatttgatgaacattccatgtacacttgaaaaaattgtgactttttagttgttcggtgcagtgccctgtatatgttagtgggccaaggttgttaatgatgttcaaatattgcatatttttattaatttgctggattgttctgtcacacactgaaagaagtatgttgaaatttaccatttcatcttttatttctgttaatgtttgctttatatattttgaggttatgttaacagatgcatacacatttagaattattgtatccacctgttggatttacccttttgcaattatgaaaagccctccattatagtaatgtttcctgtatcaacatcacttttgtctgacagtagaaactctgccagattctttcacttagtgtttgcctggtgttgactcagctccacaccaaccatccccactccacctctgtggctggccctagctccgcaaactcatttctgctgggccagctggtgctgtgctaaattctcccactaggggcaccagagaaagcacgcaaggctggggaagatggggaatgtgctcctttcagtttgcttccggtttctttcccaggcttccggtctacctgccactggggccacgtgtcctctggatgctgctggttcacctggcagtggcacttccccacctagctgctaaaactgggttgctggttcccgactctgcagaatcagcttgatctccccgctagagacctcaaaccactgctagggacacctcatctcgggggtctgggtttcaggccgtaggcccttccagctcagaccctggcagcagctgccatccctcttcagaggccagatcccagtgtggcagccgccctggggcacctggggagtgactcattttcatgaattccagcttattagttttattaattctcccctttgtaccccagactgagtggtggtggctgccttgtgtggttgctattttcctgatacgtgggctggcaaaccaaaacctgagaccacagccagctgcagtcctgtgttcctacaacctgtgagctaagaatgttatttattaagtagaatattaataaataaataataaactatactatagtatctaaatgtgaatttttttttttttacttaaagcatcttccatagatatatatgaaattcaaatacattttattgggacacactgttttaattcattttcatatttattgcctcttagcacaatgcttgagccttggaatacttttaactcctttcattcctctgtcaccttctgtgttactgtggtcacatacaattattcacactacttatattcattatattaaatctgctgtatgattttttacttctatatattatatccctaaagtccttgttattattgtcttatacaatagatttttatttatattaactaatattctttccattgcttatgtttgatataacttttcatccacctttaggatttcctttagtgtggtctgatggtgatacattctatgagagtgtgtttctttcactttgtctttacttttgcattttgaagggtattttgttttgtagaacgctctagaattagcagtgattttcttccagcagtttcacaatgttcttccattgtcttttctcattgcttactttctctttttggaacccgggtattattcttattgttgctcctttaagtattgtggctgtttgctctgactgcttttaagactttctctttattcttgggtttcagaagttttgcaatgatgtatccaggtatgatttttccttgtatcaattctgcttcagtttctcagagtttctcaaatctgtggttattttctatcagttttcaaaaatgatctcctgtatcttcaaatattgtgtctgtccctttctcttagtggatccatggtctatcagttagctactgctgcataattagccgccccaaagcccactgatgtgaaacatccatttttgtattatcactcatggatctgtgggtaggcccagctcagctgggtagctccgcttctcactacagatcttgagtctactgggatggttctacaacccacgtctctcttcctcctggtacaagtggtctagctgaagcattttcttctcaggatgatggtgggggcacgagagaaatcccaatcacacaagctcatctcatgtctttgcttgtgtcacttctgctaatgtcattgcctgaagcaagtcatgtgacagtatccaacgtgaatatcagggaactaaaccaagtctttggctggaggaactgcaaagttacatggcagagggtattgtatagcaggggtccccaactccacagtccatggcctatgaggagccaggccacatagcaggaagtgagtggcaggcgagcaaggattccagcctgaggtctgcctcctgtcagatgagcagtggcatcagattcttgtaggagcacaaaccgtattgtaaactgtgcatgtgagggatttgggttgcatgctccttatgagaatctgatgatctgaggtggaacagtttcatcccgaaaccatccttctgcctcatccatggaaaaattgtcttccatgaaactggcccctggtaccaaaaaggttggggactgctgatgtatagcaaaggctgaagaaacagagtcaataattacatcgacttatatacaactatgccagaccttgtctccatgtcccaggtaccaaggctttttctgtattttccattctctttttaaattttgtgatcttcagtctgatggttcctacctaccattcttcttgtttactcttcctttctctgattgtctaatatgccattaaattcacctcttgggcctttctgtcatacccttgatttctatttcattaacttctaccactttgttattttcttcatacctactttctgacttttaaagcggaattttgttgttgtttgcttttgaagtagggtctcgctttgtcgcccggctggagtgcagtggtacgatcacggcttgctgcagccttgacctcctgggctcacggcatcctcccatttcagcctcctgaatagctgggactacaggtctttccagagacacatagaaggtgccatctatgaggaacaggccttcaccagacatcaaatctgttggcatcttgatctttgacttctccaccgccagaactagatcaagacatgaaacccatgttcaagatactttccagtgtgtcttcatgtgatcctctgagtccagccatcaggctaccagcagctcttggaaaccctgacatacttattcttagaagactgctttccggactcaaagtggaacctcaaattttcaattttctttgtttttaaagcctacacataggtgatgatatatacatgcatatatattttggagaatttataattctgaaaacaatgctggtcttatggaacccatccattcccctttccccgtgtgtgctccgagctgtggtggcacgtgaaaaggggtccttccagcagtggcccacagccctgggctgcttacttgctcacttcatttacaagagcaagaaatacacattcttgtgttgtttaagtcattatgatgtggggatttccattactcacacacctgatctagtagtaacacagtagcctattttagcaatatcatttattcaataatccattctttccccattagttttgagccttcatttattgtgtactaagttctggttatttttagtggttgtaatctccttctttcctactctcttaatcatgggattgccaatatctgctctgtgtttctgtgccatctatagcctctggccttggtactgcttcaaaactgatatttctaaccttactttgacttctccattcagtgaagttcccatagttcatcactcaactgctctctttccatcgtgaccttctgaactagctcacacccagatgtacttttgttatctgcctttccccctcataaacatgggctgctgctggggaaaatccactaccgaactcttgcaggtctctgcaaatgtttaatgccctgtcttagccatgacctccacaatgctgggctatcctatgttatgtcccctaagatatcccttctctcttacctttggggatagtcctaagcttccatcatggcactcaaagtccaaccttatttgtaccctcattctctgagcagacaccaccgtattctgtttcacagagaaaatgtgactgctggggataattctttcaacttcctggcctcttcctatacatgatctttctctgtattcttgcctattgctcttccatgttgatagaagtgtctgttctccttgtcagtgtctcggccttggatctgtcccctagactattctgcctgtgtaaggaccttccctgaccagctgggccaccatctcctgcttctccaatccctcactctagactgactcttaacctttggtcaacaatacttgagcttttacattcataatggagcatctgtgttgaaccttgttcttttctagacactaccctccgttctgtcttccatccatggtgacttttctagaaagagcatctatcacactggagacagcaaactccttgatccattctaattcctaaccctgcaataattttctatctcccttactcaagtaattgggagtgctcctagtgttaccagagacccagcagttcccaatttcgaatttttccgtattcacatttcttgacttgctatgattttacatcacagattacatccttcatttgaagagactctaatggaaggctgccatggaaactctctcatgtggctgacctcctacctcacttgctctttctgaatgaagttcccacttttgcctgccttaatgaaagtaatgctccccaaactcaagcccagggctgcgaattggaagcagctggggctactgtttctgggtgctggtgtgaatggcaggatgtgaacaccagcctgtgacgggcaaaaagatggacacacaggcagagcctgacaggtgctggtggtcctatctggtcctgagttgctgggaccctccttgcccactgcccctagaatggactttggcctcaggttcgaagtgttcagatgtgactgagatgagccttttccccatgcctcaggaatagcgaagaaactctatctggaaggttccccaggcttccccacccagcagcctctggtattagaccaggcagtggctggccaggatggtggggacagaagggagacaaaggtgagcagtgggtggggtcacatcctccctgacattgaatagacaacatggggaggaaggatgagtgatctttagaatgttcatggaaaatgcatattgggaaaaagaatgcatgaatttcaaattgttttgcaacaaaataaacttgtactaacttgtgaaaacacgtccgaacaggatctagtttgaggccctaagaagtataagacaacagtttgaacagagctcctatcagacacatgaattctgctaaaattgaaaccagaacaaacatgcaattgatggtgaagcttggctggaaacatggtgaaatcattgatgatttattgaaagtttatagggacaatgcctcaaagaaatcagcaatttaagtaagtggataactcattggaagaagagaagagatgatgttggagaggaagtccacagcagcaggccagccacatcagtctgtgaggaaacaattcatcttgtttgtgccctaatttaagaggactgattaatagcagcagaaacaatagccaacgctgtaggtatcccaaggtgttcagcttacacaattctgactgaaattaaagttgagtaaactgtccactcggtgggtgccaaaactttctcccagctcagctgcagataagagaaaagcgttctatggccattttaaacaagtggaatcaagatcctgaagcatttcttcatataattatagccggagatgaaatgtggcttaaccagtacactcctgaaggcaaagcacaagcaaagcaatgactacctagaggtgggcgtggtcccatcagagtaaaagcagacatgtcaagggcaaaggtcgtggcaaccgttttgtgaatgctcaaggcatcttgcttattgactttctggagggccaaagaacagtaacatcttattatgagagtgtatagagaaagtcagccaacgatttagcaggaaaacacccaggaaatcgtcaccccggaaagcttcaccagagagcccttctccaccatgacaatgctcctgctcattcctctcatcaaacaaggccagttttgtgagagtttcaatgggaaatcactaggcatacaccttccaggcctgatttggttacttctgttttataattttaaaaaatctttaaagggcacccacttttcttcagttaataacgtcacaaagactgaagtggcatggttaaattcccagggtgcccaattctttagggatgaactgaatggctggtaccattacttgcagaagcgtctcgaccttgatggagctcatgctgagaaataaaacattttttaatttttatcttttaattcaattttttcgtgaacttttgaagtccccttgtatttgtttttggtggaactttgagtctgatttctcagctccccatggatggctgcatcttaacagagaaatgaacgccatttaccctgatgctctctacttggcctaagtttcagatgttgaacacacacgtgtgggaatttatgaatctgtgcacctgtgccagctggtgggtgaagtctaagtttcttcaacacaattagttatcttctgcctcctggaatctggtaggaaaggttgaggaaaagcagccatccacagcgcctccaccactggaatgggggcagccctaacgtgtgccccactgccccccatgctgaggagtccttcactccagggatgtcttcaccccaatcattcagactcccccagtgttcctgcgtcacctgaaaggtcggaagcatctcagcacatactctccatgagtggtacttaggcctccctccccatcaatactgaagccctcagaggcagaggggagtcaaggaaaagagtggccatcagcaataaatgagttacaaggtttgatttcaaagagaaaaacttgtcaccaaaatcactactcaggagatctggacttcctctgaatgtgagttaaagaacccttgagggttaagagccaactgcacctgatccccactctcccatcccaagaccctgggaagtcaaaccaagaggtaatcaacagaaaacaagtttaatgcaacaggtgacaacggtctggagcgagtccatgctccggaaggctcagtctgtggcagtcccgtggctcaagacaggctgaggccggctgcaatggaggccagcagcaggaggatggccagccacagcccaccacagctctcacccatgctcccagcatattctttgaacactgatgagttgataggtggcccctctaaattgcagtagcgaattttacaacacttgaggtaaaagaagggcatgggctcttccaggagaaaccgcttctcctctggcttgggtctctccatcgctgcacaaccagcggagcactgcttcgcaaccatgaaaaaacgtggaaatatttctaataggaaataaagaccgagagaaggcaatcacgcaattccaatgcctgacaccgaggcccttctgtctgggtcaaagcctcacccctggcggccctgctcaaaggtgcacagtcaactggggcaccaagggggagtcgggaggacgagggccaggcctgtgtgttgaatgctgcttcagggaagggctggcttctgcgtggtatggcctgtccatatgcactgggaatgcgggtctaggggttgctgtttgggaacaaacaggtctcaacttctcaaacacagggttggctcaggcctttgtgaccacagacagacacatgactcccagccattctggccatcacccagggtgtggagctggcctcttggtgggcctggctcgactctgagctgggggtcttgtctcatgaccacacttcatcttatacatcactgtacaaatcattttgccatattaagttataaagtcgatgtgggccacactgagtctgaagcatcacctcagcaccccaccaacttcgtggataccgaagggctggagagtgactgctgggcggaatcagaattcacgagccctgaagatctccctgtgggcagaatgtgctgggtgtccagattccccttggggagggcttcatgtacccagaggttttcaggggaatcacagatgacagagcagtggtctccacaatttttaaggcatgcaccctcctttgagaacacacttgaaggctgtacaccttggttttgtgcatctcttgtaagagtgacatagacactgttctctgtggcgcatttaacactattaaagcttaatttttcatttaaaaatggatgatatgaaatccagattttcttcctacctcccagtatttcatctggacccactgtagcaggcactgccttacactagcacagttcctacacctctctctggcctctgaggactttgctcttcacattttaaagggaaaaaaaggcagggcgcggtggcttacgcttgtaatcccagcactttggggggccgagggcgggtgggtcacctgaggtcaggagttcgagaccagcctgaccaacatggtgaaaccccacctctactaaaaataaaaaattagccagtgtggtggcgcgcatccataataccagctactctggaggctgaggcaggagaatcgcttgaacccggaaggcgaggttgcagtgagccgagatcacaccactgcactccagcctgactccgtctcagaaaataaaaaaaaaaaaaggctactttctattagttattccccattgaggaaaactagacagccctgattcctgaaagccctctgttcacctgcctttgggtccccaacaagagcgaagatactcactcacggccgctataacgcagtatggctctgtccatttgcacctccttgggttctggcactcgaaagtgttttctctctcacaaacatgacaccacactctattgtcaccctcgtctgaaaggaggaataaaaaagaaagcagaatgttccagttctccgtgcctatctgatgaacacagccggcatccgaccagcacaaactcggcgggtccccatccttctccccctgagcagtggctggggccacatgactcgagtgagccgcatggggagaaagcaggaggggtctccggccacgtaagagctgcccgcttccccttcgccttcccccatgattgtaagtgccctgaggcctccccagaagccagcaccacgcttcctggacagcctgtggaactgtgagccaattccacctctcttctttataaattgcccagcccccggacttctttacattctgagtgatttttcttctctcctgggggctcccccgtcctcccacatccaagcacacaacatgagcgcacagcgcacccccactcggccgcagcaccctgaccccaggtcggccacgcggcacccacgggccctggcatctcccggccgacggctgtggaagtgaccctggggcttgggtctgctcccacgtgccctcccgcccacctcccaggtccacccacctcccaggtcctgccccccgactccctcaaaggagttctcccttgggtctgggttgggcctggcctagctctgcaggaggagccggccctcctcccgcagcttgaacggttctcagcccgtgaagcccccggaggccaggccggcgggagcctgcagcctgagggctcccggggaagcgcggccggagcggggcaagggctggggaagggccgggctcaggctgccccgccgccctggtggaagccgcacgaggcgaggctccccagaggcttccaggcgccacgggccgcctgaacgctccgttctcacggcctggtcggggcggtggccacgcggtgccaggcagacgccgcccggccctgtcctctcggcccgtggctgtggagggcgagccaggctcacccgttcgctgggagtcctctggatctcgttgtctcgcagtcaggttggcgtctgtccacacccgcggtagggccacgaccagcagcaaggcgagcagcgccatcgtccccagcggtgcccagggagggtcagcgcgcggcgccccctccccgcccttctggaaccttcgcagcctccgcgcgcctctccccgggtctggccggtagggggagccccgcccgccccggggcgcgcgcctcccacccgccggggcctgtcggggtctttggagcctcatctcagggcctcgcggccgctggcggccctgaacgccggttctgagtcccgccttgtgctgctgttggagcggccggcggccaggcaggaacgggcgcgggagccctgggaaaggcgcgtgtggaaacgcagcccctgagcccaagggccgtctccttgaggaccccacggcccacagaaagtggccggcggccaggtaggggatcttctccgctgaagagcacgggctcacctctgataactcgcccctgaatagcttttagctcattataataccaaaaaaaaaaaaaaaaacaaaaaccacatccctggggagagattccagatgctaatgacacactccagcgcactagtgtgtgaggtcacggtgcctgcgtgccctgaggacttcccaaaacgtgcttactagtaaggcccctgcctgggccgttcgtgagtaatcctgtaaaactctcatcaagagggtctccccagcgtgagtagcgactgactcattcttttgagcagttcctctttcaagctgtactgttttccttaactaaaagctcaaataagaattcctcctggcgcctgtagtcccagctactcgggaggctgaggcaggagaatggcgtgaacccgggaggtggagcttgcagtgagccgagatcgcgccactgcactccagcctgggccacagagcgagactctgtctcaaaaaaataaaaaaaaaaagagaaagaaaagaattcctcctaagtcactagcttttggctctatctcctgagtggcaggttctgtcttgtctctctgagatcctgactctttaaataaaggttacttaaccctatacctcttgctaggcatctcttgtctgaattccttcctccaagaagactaagaactggaggatttccatgcctctcacagtgacagtgctacccaaacatcagggttgtcatctaggccccctgccctgcacagaaagccaatcaccaacagcagtgccagggaagaaggcctcattcaagtgctacagcccagagatgggcgctcagtcacaaatccctctcctcagcccactaaaattagaagtttccagagcagggaagaaatgtcaccctgtgtgggaaaacaggaattagggagagtgaggaggcagctaggcagtcatgactggtgaggggtctggcctcaaggacctactgagtttcagcgccttgatactgtctgggaggcccgatggttggtttcctgagaaaggagctcagataagacaaatgtaactttcccaagttttaagacagggtgggccaatttctatgtttattcaaaagaaaccctaaatactagttttacgagaaattgggcccatgtgagtaggccccaaagggcaatccacaggtggtgttctccaccctgctttctcctctcaaccctctgtatagaggccctctgttaacacaggcaggagcaggaatttcacactcttttcctttctttgctttcttctttgtcttttttttttttttacagttgtgatatagtttggatctgtgtccccacccaaatctcatgttgaattgtaatccccagtgttgggggtggggcctggtgggaggtgattggatcataggggtggtccttcatgaatggtttagcactatccctttggtgctgttcttgtgatggagttctcacgagatctgttttttttaaaagtgtgtaggcaactccctttcttcctcctgctcaggccacgtaagaggtgcccgcttcccctttgccttccatcatgattgtaagtttcctgaggcctccccagaagccagcaccatgcttcctgcacagcctgtggaactgtgagacaattaaacctcttctctttataaattgcccagcctcaggtatttctttatagcaatgggagaaaggactaatacaagttgcatcatattccatggcctggatgtaccatagttaatttaaatagcctccttgaatgaacatttgtgttgttcacagtgtttttatatctcacatgtcaaagtcaaatacattataggatgaatctctaaacgttttattcaggaatcacagaattgtaattctgggcgtacacagaccagaaatgtgtttggtgtgtctgacgaacaaagagaaggttgaaagttttatttaagaaatgttacctattgtttagaaagaaaacttgtgggccctggtagaggtttggggagctggcaggctctgatgggtgagtgacacagtaggtagaccttgtctttgagtcacggcaggtcgttccagcagctgttaggtgcacctgattgtaaagttgcagcaggcgtttcagcacttgggcttgcagatggttcttggagcaggtgctgtctgcctgagtggttttcctctggccctctgccttgacttagtcgggtatgaccagaataactcaatttatgaagtcaactttcatatacatgacgctgcaattgtccctaatgtcattccttacatataccattataccacagctttccagaaatgagatcaagggacaaaagttaaatatatttgcagtttatatgagtattgcccagttgctctatctggtctttggacaattttgtcattgaggagtgagtgcttgttttcatggtggtgtcagaaagaatgtcctcttatttactctttggattttcaccaatgtgacagatgaaaatgaaaatagtatccgggtgtatttttaatttgcatttttaaattataagtgagcttgagcacttgatatggtttgatatgtttgatatggctagtggatatttgcattttcctgtgatctctctatttatgtctctcgtccattttcccgtttaacagacattgcttaacagaagacaatatttgagttgctgaccaatcccgaaatagttgtgaggtatgatatcagcaggacttgttttccgagccttgatcatgaccctgtgatcaaaacaggatataacaaagaaactggcccaaaccagctaggaccaagatggtgacataagtgacttctagttgccctcattgctcattatatgctaattataatacattctcataagacaccacatcagcaccatgacaatttacaaatgccatggcaatgacccagaagttatatggttcatatatgatgccaaaaaggctcattacaatggatcttgggagtaatttttcaaggaatatgaacaaagtcttccctctgtggttaattcatgaatgctgtgttggaatattctggatggtccagactttcctctgtaatcgacgttgagccctgcacaacttcaggagggcgccagacctcactactctcaaggaaaaggctgaagtggaggaattgattcccactgatttttttttttaatttttttgagacagagtcttgttctttcaccaaagctggagtgcagtggcatgatctcggctcactgcaacctctgcctcccaggtccaagtggttctcctgcctcagcttcccgagtagctgggattacaggcatgagccaccatgcctggctaattttagtatttttagtagagacagggtttaccatgttgaccagtctggtctcgaactcctgacctcaaatgatccgtctgcctcagcctcccaaagtatagggattacaggcgtgagccactccacctgaccttgattttatttttaaccatcctgtctgagagattatttgtggaggctgacagcagatgtgcagggttcaacagtgcagtatgctgcatttcttcagctatacctcatattgtaaagactgtccaggtaactcaacaagcgggaggtaagggttgcaggtgggatactgtagtacaccccattggtctaaaggcacatttccttcttttccacccactgttgcagtccagccaggcataactttaggagaatgtggttaggtaaacatgtgccatttggcacagggatatttgaatttcctggcatgaggagtggcgggacttggactagctaaccatgagagtgagttagtagagatgtggatgccgtcatgctgatggcctgctcagagtagcactgggctgtattcgcccaaacacccaacagagcctggccaaatgcaaggcccagtccggtctggggacttctctggaatgcctgtgccagtataaccgggaatgtccctcaaacagagagaagcaaattattatctcttactgagccctttgctaaacaagaagcagagccatgtggacctatgagagatctggagacacaacattccccattgaggaatacaccgcccttgctattctgaattcaaatgggtccctgaaccaataaaagcatgaatgtattttcaagaggtggtgcatgcagcttcatgcaggcctcctgagccagtcgtccagatgtggttaggaatgtctgctatcaggacacttgctgcctgggaacccttggcagaggccagcactgccacccagcagggacctctggtgtgttgcagctgctcctcaaatgcctctggaagacaatagcaacttacgacttccttaccaggaaacagcatcagatagccttcaaaccagaaatgcctctcatgtcttgatgtcagagaaccattctaccaagaggaggagcagcccagcaaagtccatcaaacggtgagagtatattccagagcagggggcaggaggacgttaggggagcctgtggcttctgcagcagaggcaatagcagaaggagaggagagggaggagcagaaggagagcagagggagagcagagggaggagccttcaagggctgctgtgtgttcggagcccagctaaagccaagcaggcctctgagctccctgctaggagttcatgtctgcagggcatgtggctgcttggaaattagccatgtagacctcacagtctgtctttgccagagaaaggcagggcaaaccatattatacacctttataacattgtttcaaatccagaagtgtgatgcctccaccgttgtttttctttttcaaaattgccttggctattttttttttttttttttgtggttccatgccgattttggattttttttcttttctctcttttttgatggggagggatggagtctcactttgttgcccaggctgcagtgcagtggcacaatcttggcttactgcaacctctgcttcccgggttcaagggattctaccacctcagcctcctgagtagcttgagactacaggcgtgtgctaccatgcccggctaacttttgtgtatttagtagagttgggattttgccatgttggccaggctggtcttgaactcttcacctcaggtgatccacccacctcggcatcccaaattgttgggattacaggcgtaagcaaacgtgtccagccagatctttcttctatttctgtgagaaataccactgaaattttgatagggatcccattgaatttgtacattgcttttgatgggattactagagaaacaggagtgtaggagagccagagtgacgccattttaaagccaattccattttaaaacaagcaaggcaattccttgccagtcacagcccatggtcacaggtgttgacagctaaggagggagtttagtaatgcctgcaaggactaactcctacagcaacaaaatgtccaaatgcgccaatatctaataacaatatgtgcttttaaaataattagaatcatgctttgatgtacttactcactaaaatcccaaggatagtttactttaaatcaacaaagtaataagttttgtcacgctgtcaacccacccacacatagacttaacttagcttttacatagataagacccctacatgagaggagtttaaaacaaagacaatgcgttcctcctcttgttttctgaggatgccctactctgcatctgagtagctttcaataaatgatctcttctcactgcactctgtgactcacctgaattccttcctgtgcaagactgaaaaaccctcttccagcaacatctttctggcgatgcactaagggaccataagatgagactatgtgctggggaagttttgtctgcagcaccagttggccacctctggtaaatggggtccttcttggcatcctatgtcatgcttagacaaggatgctcgcctagaaactcaggttagaggctcagcccacaaggttagatgccctggggtatatctggaacaatggaagtctctttgcaagatgtttgtcagtacatgatctgaactaatccaccttgtgccctctgctggggatgggaaagctctacttctcatcatttcccagctcattgctttgctgtactgcagccttggggcagccccaaatggctggtccagaggtttccaccttccagtggcggattctaatgttctttatgtgtttctctctgttcttttctgcctgctttggatctgctgttactaatctgctgccgagtggcaactctgcttatctcacggtgttgaggtgagactcactgtttttggtattactaattcaaggctacctggagattgtcttttcttgtacagttcagccagttctggctaaaatgtatacattaaaaactcatttaaaactgaagaaaaaaatgatgaaaaggttttttttttttttaaaccaaacttccttaaagactactttaccaaaactttggtccacagctttccttggattgcgtgttggatgtctgggtcatttccaattaagaaaagtttatgctatgggaaacatgtttctagaattgtggaagggtcttatctataaagtgctaacatctggcaaacagtgcaggatctcttgcttcctcagttttcccactcacggatgagcgagtgcgcttagctgtcccttcccttcccttcccgctctggtttcctgtatgcaatgtgctcagccttccaagccttgggacacacagggatgctcatgctcctttatgttcccctagggactaggggttagtggacctcacccagaggtgtgggatcctttgggttctgtctgctggggagcctggagccggggatcctccaggtcagccaccatcctgttacatggggctcttcagcctttcgggtcccagggctgcagtgccaccccagtggaaagcccatttgagactcagagggatatttgccagcatgtcctgctgggtctccctcgtccccttcattggctgcatatttgctgtctgtgcctcactagtgatgcccgtcatcctgagcttgcatgctctgaagtttatgcctgccattttccttctcctggtgattttctttctttgggttatttaattcagcatgtctctgggcagcattggaggccaaaagcctcccaggaactagtcttattgagaagaaaaataattttgtctaattcagaagttatctaaaggtcaattcaaatgatgaacttgaaaatagttacttatgaagcaaggtagaaaggagccagtaagtaggggagcgagagatgtgaataaaagttatggatatgaagatgtatttttggtaaggaaggttataaagaatagcaaataatgtatgaaaaaggatctcgtgtggtaaatttttgtcctaaagtaaaatgactaatgattattagtcattagccattaatatgactattattattagttattagtcattaatgactaaatgattatttaggaaagagagaaggttagggcaaggcagaaagtccaagcacatctaagatggtctgtgtacactgggataaagttcgtgaaggggaatttatgaaaggaattttgtatatgattaagttggttataattgaaaggaagccatttataacagtctttctaaaaattggtcgcctacgttaaaacaaagttttcttgaggtactgatttgctgtgaatgaagttacaagaaattttactttcaattttataccccgtttctcttctaaacttctcagatccatatttccgacattccattttttctgtctcactgctttcagctttttcccccttgagcaggcctgagatgatgaccttctccttcagcattttttgtcagctcctgcaccccttttttcctccagttttaactgttggaatgacctgatgctaaagttttatcttgaaggtctagaaaagcaatgttttcttctagtataacttgattttatattcttggcttttcttgctgtgtctaaattttcagtgtaatcagaaaacttctcatgctgttcctaagggtcacatatgctcataaccttaaacactgttcctgtgtctgattgcattcaagcacttctttcctcaagtttgtcttccaggttatctaaatgggcttcctgtaagaagaagcggtctcactgcagaaggttttccctgcctttttattagctggcttaaaaaaaaacaagattttatgtttttttcacgataattcctatactgtctttattagctttatgattgcaaaaaaactgaaagttaaaagggttaaggtttttacctccatgtgactttctctattgcttgttaaagtctttatgattattactcttggttaagtgtataactattacaatgacctgtgattttatgttaataaaatgttttgagccttttaacatcttagagaaatatcctcaaaatcaaaatcttaaatttagtctctgatttagtcttattgctggggcttattaagcctatagaaattaatctctgcaaggtcatagactctttctagaactttctggcagaccatgaagtccagtatcaccacctccagcctgaaaattatatattggaagaaaaatcagttaaaggattccctcagcccccttgaagctgtccttatcaagagttattaaccaatgcttgtgcttagttaataacctgttgtagggctttgactcctggacacacatatctaaagatggcactgacttctaccagtatctgacaaaaactcaagttaactgaaggctcgtctttagacctgggcaaaggggacaacgtaaactgctttcatgagacacaaggacaggtctgtattccaaaacattatgattcatttcataattttgcctttatctgaaataatataatttgttctatgtctatgtggaaggaaaatatcttgggcccccagaatcactaaggtagagggaaaattcaagctgggaactgctcagggcaaacctgcctcatagtcatccctctgcttgtattcatagtcatccctctgctcactgagataaatgcatatctgattacctgctttggaaaggctaatcagaaactcaaaagaatgcactgtttgtctctcacctgcctgtgacccggaaaccccctccctgctttgagttgtcccacctttccagacggaaccagcatgactccctaaaatgcagaaaaccaaactgtgctctgaccaccttgggcatatgtcatcaggacctcctaagtctgtgtcatgggcgtgtgtcctcaaccttgacaaattaaactttctaaattaactgggacctgtctcaaattttctgggttcatatttggtaaccatggggggattctgagtggaggtgcccctgagctttgacaaatcttgtattgatgcttggtacatcatgaactaatttattgctcaaatcaataggacaatttgctgaggtctgcgagctgcccctccagagaatccctgctctcccaaaatttggtcaagatctcaagtttattttggtgtacaactcctttattttggagttttactttcttccaacaaggaagggaagttttcctgcttccgtgataatggaaggcaggtaactcctttatggagtttgagctcacttccaacagcgaagatgagatttttcctgcttctaggatggtggagagcagtcttcagcctgagacccatccctgggtaagtaactgaattggggtttgtcttggctaaagttaaagttaacaaccagctggtcttaatttctttttaccattagagtgttcagtgatcatgtaagttgtgccattgtttgttttgcttaagggttttttttttttttttggtgtttgtttgtttctgtttttcctactgtttctcttgttgtttcagtcttttgcccattgggtttaatcaactctatccaacttgatcaactctgaagggaagttccaaattatggggaacaaggcctctgaagtgactaaattccaccccccgcctcccctccacacacacacacaaaaggtggtatggttgggggagaaaaacagccagcaaaaggagaaaaaaaggaaagatttttgattttgactactaaaggggttttatttacagaacaaggccacttttttgctagcaggccaaactgaaacaatggcagttgccccacgctgtagttccatacctaaggctctgctttcttttcaccatgagagcctgggtttggtgggtttggttcctaaatcaagccctttctggtttgatacttggtacctctgaaatagcagcaattttttctgactaaaatacggtaatgaaatttaaatggattattttaaaaagagctcaatggttaaaagtcagtttaattaaaaggctaacatccaagatgtacgtgtgtgtgtgtgtgtgtgtgtgcgtgcacgcatatgtgtatgtttgtctttgaaaggtcttcatgtgtttgttttttggttgtttttctcctctaggaccttgccttttttttttagcaaaagtttttttcttctcagttgactgaattctgttattacctgattgtttgactaaaatagatactgcacagaggctactctggggtttttaaggaagagtgtagtttagacacttaaaaatgtctttgtttaaaactattttttaagtgcactgtaaaagcatcacgttgtctagcctcataataattcaccctttttggagacccaggattcagtgtgggctctacccagagctcagatatctggttaaaaaaagaaaaacaggtagtctctatctaaataaaatcagtcttcctatgtaatccaacaataaatttctgtaattttattactgagttggcatccatctttaatctttctctagcaccaccagacattttctctgtgtacctgataatgtaaattttgctatttgactttcacctgatatgcagatttaaggctatttagctgacaactgtctagggttctgaaacaggttatcaagaatctgaaagtctaagatatgaaaaaagaggtttttatgaatctataagatgtacttttatcagcatgcctaatatgtctgtatttatgtgttgtgtacacaatgtttcactatgaaaaatatataaaagagctctaattaattggctcaaagtgaaataattcaaaaagcagctatattcattaaatcaatatcaatgatttatacttaatacgtaaatactttatcaggaaaaaaggaaagattagtcaaatgctttttcaagtttgcataacttaagtaaaattattaataaatgagctcgctttaaaattattggtaaagtaatattagaaatgtcagcatacatttttgtttgcaattattaatcaagcaatttcatacttacccctgccaaatagtataagttgtcaaaatttggcagagggtttacaaaactataaacccggcccaaaacataatgatatttgcttgtgtaatctttaataaataagtcattgatattgatttaatgaatatagttgcattttgaatttagtaagattatcataacttctaattctgtggctttaggcagtctagtgcacaggcagtaaggaagtttgttttgagaaaggactgttatagtgtttgtttcaaagctaaactataaactaagttcctcccaaagtccaggaatgaacaaggacagcctggaggttagaagcaagttggagttagttagtcaaatcttttttccctatctcagttataattttgcagtgatggtttcataactttaaatcatgactatcacagttttcataaacaatctaggtaaacaaggtaattaggtaaatgtaatgtgatacatacttgtagacaaatttgtcataatttagaatagaaagttatattaa

SEQ ID NO: 700 - DNA, 1799 bp, Homo Sapiens
cttctcgctgcctccacctcctactccattcaatgcatcttccacagcgcctcctgagtttgtttcctaaaagagcaacctcaagactcagctgctctgcctgaagaactctgctgcctccagcagaaagctccacctttggaaacagatatgatcctccagcaatcccaacactcggaggctgaggcgagaggatcacttgagctcaggagttcaagtccagcctgggcaacacagcaagacctccagtgaaattcaaaaaaattagccaggcgtggtggctgtaagaattaaagaaagaggagagaaacatgaagggtggtttgacagtcatcagggacaggtttattttgaataataaacttggcagctggccgaaatgcatgaggctagaaagggagctgtaacttaaaggggcggtgtttgtcccagatgacagtgctcttgctccgtcagtgtcatatggttgtagtcccagcaccttgggacgctgaggcaggaggatcgcttaagcccaggagcttgaggctgcagtgaactgtgattatatcactgcactccagcctgggcgacagagcaagatcttatctcaaaattaatgtattattatcattattaattttttgagacagagtcttgctctgtcacccaggctggagtgcagtggcagaatctctgctcactgcaaccttcgcctattgggtcctttgctgctatgattccagggctggaagggtccttaaagatattccagccaacgccctgggtgatgctagaattccttctagactttaggcttgatccacacactcccagaactagtaaagctctcagagacctggggacctggtatgcagggcccactcctgccttctctgggggaattttccccaccgcctcctttctttgcctggtccaagtcccagcttccagaaagaggtccatacctgagatacctccacttcctcctcctccagagccagcttaaagtcaggaggcggcacaagtccgcgaagctcagaaagtcccccagattcctctgtggtcaagccagtttcattcaattgaagcttgttccctgaggatttgttcatgggggagttattgtgtacttgattatagttcccatggctactggctcacagtgtgaagggaatgggcatacatccacgtcctcctgcaaaattgggatttgacctcatttataaccaaacatgcagcaggcaaccttgcaaattacacagcatgaagagagtccagagagttctgaatgacttagtagaaaataacattaaataaaatagtacatgcggaaggatgtgttctctccctggttcaacttaggtgcataatagctgttcatagcagtattaaccttgacatccaggagggagaccattcaactgaaaggttgcaaactggcaaccctcagtgggaatctcacccatagacctatatatccaatttcagagtactatggtttgaatgagtccctcaaatctcaggtgttggaaagttaatccctgatgtaatactgttgagaggtgagatccttaagaggcaattaggtcaatggattaatgccattatttcaggaatgggtttgttataaaagcaaattcagccccctctttctctctctcatgctctcttgccacgtgatgatgtctcaccagaggcagctcctgtatcttggacttcacagcctctagaaccataagccaaataaatgtctattgttcctaaactacgcagactgtgatattctgtgatagcaacatgaagtggacacagagtgt

SEQ ID NO: 701 - DNA, 2732 bp, Homo Sapiens
ggcacacatacccctgtgaatgccagaggcaaagaagagcctcaagccacaggctatagctgacctggcaccctgggcacagcaggcagattcaggggaggtacagccatactgagatagaggcagggctgggccctggtttctccactccacagagaatgtgcattgtaggcttcatggaaacagagactgtatgttatccacttccgtactttcagcatccagcacagggcctggcacagaataaatgctttggggcgcctgacactgatcacactacccctgccctcctgaggctccacatctatgtatcccatggaaaccagagtcacaaatggagacagattcagagactcagcctgaaaggagacagaagaggccgagagctacaggttgcatggcccaggatggcaaagactccacggttaatatcacagcagctggacagagacaagagcagagtcaggcatcctgggctggcagctgcctgttgggactacacagccccaagccagctccctgtctccctaggcagaacacacgttggcagagacacttgctttctcctctggctgtttcaagcactggcctaagaggtggggacttgggaggaagagaactgacattgcggagcccaaggaagcgaccagaggaagctaagtccccggaggaagtcatgaggaccacactttccagctcccccatcctcttctttcagccccaaatcccacgatccactggaaacatgagcacttggattgctggaaggcccattaacattcagctcatacaaaactggctttgcagccaggtgcggtggctcacacctgtaatcccaacactttgggaagctgaggcaggcggatcacctgaggttaggcattcaagaccagccaggccaacaatgcgaaaccctgtctctaccaaaaatacaaaaaaaaattagccaggtgtggtggcgtgcacatgtaatcccagctacttgggaggctgaggcagaagaatcacttgaacccaggaggcagaggttgcagtgagccgagatggcaccactgcactctagcttgtcagagtgagactctgtctcaaaaaaacaaaacaaaattggctttgcagacaggacactgggccccagagtccacccatcctccaaggcccagaccaaactcccccatctccatgacacattttccaagtcctcggggcctgtaacccatagttagcaatcagatgcctcctgtcacgcattgtctaataactgctttgaacatttccaacttggaaatcaagtccctggaggaagagccccaggtcacggtgctgaatgcaccctacagcgggtcctccaggattctggctggcaagccccagccctttccctcctccctcccatcctcaatcccacactgctccctgcttgcctgtgtcctgaaagcccaggcctcgatgtttcccatttgtagcctcagcattcgccacaccatccttctgaggaccaagaaagaaaacctgagcctctggccccggcttcccaccccaaccctgtcatctggtggggtcaacaggacaagttttcctaacccagcaggggagggaatttatgtcagtcccagtggttctaccatcccttggccaaccaggcaagagtgacccatgccccagtaagaaatctggatgcatcagcgtgggctgacttaggagctcatggagttgcccctcaaaggaatctccttttctcctgcctttttcatctttggtaggcggccctgctgcctcccagcaggtgaccacatggccaagaggctgctccccctctgaaggtctcaccttacccttctgggactccaggaacatctaaaagggaacccaaactgctgtagtcatcaagcccctgaggactgtcccaactggggttccccctaagctggatcctaacactagggggctcaaaactgcttgctgtcagcctccagctcccaagaggagtccctgagggaagacatgccttcctgcggccagtcttgcggggtcgtggcttgctcttggtgaagcagatgttgtgcttggtggacttaaaggactccagccgccgcttcatgttctgctggaagacctccttgtcctgccgctcctgcgcatcctctgagatgaagtggcgactgcagctggctttgtactggcaatgacagccccgcctggctatgaggatggatgccttggcctcccacaagaaccccaggccacagccccaacatattcaccacaggacctgccagcccagcttttccagaattaacaatggattgaaaaacaaaacaaaaaatacaacaggaacccagccagagaccctgtgttctcagttccctgggaaaagcttccctttatcccagaacttattcccccaaacctggccttccccaacccttgccatcctttcccgattctctctggtttgaaggtgaccctctgtcttgttctactactgtgacaacatgggggacattttctttgtacctccatttatctgagcttcgcccacacacccagcctacctgcccccttctagctacacaggatcctttctccagctggaatctcctatctagccatttctacaagaaccaccatgatatcctgggctgcactttgaactttcataactatctcccctgacaccctggaccttctcagtcccaataattcaggatcacccccatcatctgctttttttt

SEQ ID NO: 702 - DNA, 4361 bp, Homo Sapiens
tgtgctcagtgccaaaatatctgatcaaaaaataaccaaaataagcaaacaccaagacgactgttctggggactatggtcagggagagccgatggctcagatccaggaaaccctaggctccagggtacctgtttcactacccctctcccccagggaagctttgctgaacgttctgataacctagaaggcccctttccaaggaatcccccacagcacaatctcccaggactctgagatttccaatagttcctgtccaaggggcagctttgcctgaggtgggagcatcgggagagggtgagggctggggatcacttcccaggagctggcagatgaagcttctaagaagctccctccctgccctagccacaagcatccgcactcactcattcacccacccctcttctggcccttcttgccttaggcttatctccctttctgtgcacccaacccccactaggccacttttgttttctcatagcccaacgttctgatgggatgaacagaggggaggaagctgacagtctccagccccctaccaactcctcagtggaggtgccagagaggggtaccataaaagtagctgacattccgaggcctctgcccacctctagctcaccttcctaggggagattcctgaacatccctgaccactcacaccgcactccaattttccctcccacttcttgggagccttctagttccctggagacctcctctcaagtgggcatgtccccaggaggggtaaaaggatagagcctcacataagttagaaatgggcagagctcttggtactacctgtctcttttccttcttcatccaccactttcccctctgaggaggcttgtctagatgtctggagcactgggaattgggggaatgaggaggagcccctcaactctgtctcagtcacatcacttaatcacacctctccttctgccccacccctctggcagtgaaggctcactcccaacagatctccacccgcttccgggaatggccagaactcgcctcctgcgtctctctttccatttctatcttcccctccccccaagagctgtagtggccttggcctcctggcagtgccttcccagcctgtttccatagaaactgggtaggctgtgcagtgcaagaatcggaggggagacaggagcaggaaggagggaccaagccttagggacagcccccgatgaaaggaccgagagaaacggggagctgccccatgcaaactgagggtgggaccccgatttggggaaccaggcgggatggagcgtggagtggggggaagaggtagcaaaagcttggtagctggctttgctgcctcctgaggaaggggcacagaatctccccttccctgccacaggtagtgggggttcctccctccccacccccttaaaatccttctttaccaggaactgcctgatccagatgaatctcttctccggggcccactagtctctaagaaagggaccatggaattcctttcttccccgaagagctccccactctccctgaccagagtctccttgatctggaggctgggcagcccccggggacccggtggccgccgctgaccccgtggcatgcggctctcaaaggccccattcatctctgggggctgaaggcgccattgtccccagcggggggtggtgtggggagtgaaggggtctggactcagaaggaaggaatgcgtctggagaagttgcccccggggctccagtctcaaggtccccaccagatctccatcgggaccctttcacgaccccgagccctttccccaggagctcccagcaaccttcgcgcttctccggagggtggggtctgccgcggcgcgggggcagcctcaccccacctcactgctggactccggagaaccatttctgggaccgggagctgtccagcgcctcgggtcctgacggaccgctgattcgcctaggtgccatcggacaagcgggtgctcagagccagctctggtggctcgggagctttcccccaaccaggctaagaccactaaaccacgcctggcccggatgagcttggatgcagctccgaacgtggggatccatcggtgctgagaactgacctagggagcaccttgacccctgccctatctgggcacaattgaagggccaagtgccaccagcccactttcctggaaccctgtctcagacttgggcaggaagaagagccatgagaggtcaggccttgcctctccccgcgttccccatctttctctgtgcctctgtttctgttttcctccggctctcctccctcctcctctctttccttccctgctgggttgggggctgctgaattatcatttctcagctctgctaatgtgctccccgctgcgggaagggatcataattctgggagatgattaagtttcaaattgtttttctttgtgttgttgaagatgaggctttaatatggtccttcctcagcccgggagcctgcccccattcctccactcctagtactctcctcactaataggctaggtttggtaccatgtcttttgtggtccttgccaaacttttatgtgtatggggtggtaaacgagaggggtatagacctaccctttactcaaaggggaatttttttgtttttgtttttttttgttttttttgagaccgagcctcactctgtcgcccagattggagtgcagtggcgccatctcagctcactgcaacctctgcctcccgggttcaagtgattctcctgccttagcctcccgagtagctgggattagagctgcgcgcctccacgcctggctatttttttatatttcactagagacaggtttcaccatgttggccaggctggtctcgaactcctgacctcaaatagtctgctcgcttcagcatcccaaagtgctgggattacaggcatgagccactgtgcctggctaggaatacatttaatatagtggtgagaaacactggtttggaagtcggacaagtcaacatttaaatcctgactctgccacttactactcaggtgaccttggatgagttacttgaactgtctgagcctccgtttcttcatctactaaatggggatactgtgaattacctcatggagtgttggtgaggatttaaagtgataaatcatgtaaagtggttagccgggtgtacagcttatggtaaaactcagtgaatgttagtagatattactacccacataccttaccctgtttgatcctgcttcccatagccttcctgactttgttcttctgttcaatgtttatctaatgcctactgttttccaggtactgtacaatagagagtaagttatccaggagtgaggaagttggctttcttacctatttgttcctcaaacaccccttcctttacctccttccttccttcctttcaactgaagtttactctcattttaccctcccaccggcttccagttcttcctgcattgttcctactccatttttccttctttcactgatgtcttatcacttcactttgattcttatcctcctaatacacatacattttttcaccttctacattattcttcatcccatttggggccatcatagtgaaaaaaagggctgaattttcaaactaggaaagagaattctgtcatgctgtgtgtatgtgtatatgtgtgtgtgtgtgtctgaggaacacacacattaattcacattcaacagtaactctatagctgacttctgaactcctacgtttgaactgtgtgcttgtttgcctctctatcccctctatttaagctcttaaaatacaagtctatttctttgcctgcctacctgtctgctctgtccttgcctctctctcttttggaatttgttgttttaaacatctttattgagatacaactgatatacaaagaactacatgtatttaatatgtatgatttgatgaatttggatgtctttgttatattctaaatgggaatgcttactggttgttagtatgagaagctgatttatgataatgtgtttttgtgtttgcttaactggcctcctacctatcaccatactggtgatgggttcaggatacactacaccaaaatgtggcaacttgacatttgagaaaacagcagaagcaggaaggtccctctcccttcttcctggaagtgggccaaaaacctctgaccgtcttcctccttttctcctgaggtagaacataaaaccctaattccagaggtatcctccccatacccagaggaaaggagcatccttgtcctcaagttacacagagttactaagtagaatttgaacaaagagaccttgctaagttttctccagttcactaccactagactatacctcctttgtccagtcatacttctgcttgcctgtccactcttaataagaatcccagtctggcc

SEQ ID NO: 703 - DNA, 2494 bp, Homo Sapiens
tcagcaaactaggaatagagaacttcctcaacctgctaaaaaaaaaaaaaacaacacacaaaatctctgatttaatgggagaggctaggagctttccccataagattgcgaacaagacaaggaaatccccactcatcactcttcttcagtatcatactggaagtcttagctaatgcagtaagacaagaaaataagaggcatagaaatttgaagggaaggaataaaactgtttttgttcatagatgacatgattatctatgtagaaaatcccaaagaataaaaatagcccctcctagaaccaataagcatttatgacaaggttgcaggatataaggttagtgtatataaaaagctagttgcattcctctgcagcagccctgaactactggagtatgaagttaaaaatgcccgcacacaattgtatggttaaaatgataaacttcatgttccatgtgttttacaattttaaaaatccattagaatctcagcaagtttgattttagttgatatctattttgtggatatcaataaactgattttcaaggttatataggaaggccaaagacctagaaaagtcaaacaatattgtcaggactgacactacctgacgttaagacctcctctaaagttacagtaataaaaaagcaaaagcaattcaaggaaaaaaggatattcttttcaacaaacaaatggcactggaacaactggacactaatatgcaaaaatattaatctgtacaatgactttacaaatttaataaaaattaacttaaaatgaatcacaggcctaaatataaaatgccaaaccataaaacttctacaagataccacaggagacaatccaggtgccttgggtttggcaatgagtttttaaacacaacaccaaaagcatgatccatgacagaaaaaaatgagttgggctttattgaaatttagaacttctgtcctgtgaaaaatactgtgaagagaatgaaaagtcaatccacaggctgggagaaaatatttctaaaactcatctctgataaaggacttgtatccaaaacaaacaactcttaaaatgcaataagagaacaaacaacccaaataaaaaaaatgggcaaaagatctggaaacttcaccaaagaagatcaacagatggcagggccaggtgcggtggctcacgcctataatcccagcactttgggaggccgaggcaggcggatcacgaggtcaggagttccgagaccagcctgaccaacatggtgaaaccccgtctctactaaaaatacaaaaaattagccaggcgtgctggtgggcacctgtaatcccagctactcaggaggctgaggcagaagaatcgcttgaacccaggaggtggaggttgtggtgagcagagatcgtgccattgcattccacctggatgacagagcaagactctgtctcaaaaaacaaaaacaaaaaccaaccagatggcaaaaagcacataagatgatgctcagtatcatgtcattagagaactgcaagttaaaacagtaagatatcactacacacctgcaagaatggataaaacccaagaaactgaccagcaaatgatgatgaggatgtggagcaaaaggaactctcattgatggctggcagaatgtaaaatagtacacagccacttgggaagatgttctggtagctttttacaaacctaaacctagtcttaacttacccaactgagatgaaatgttatgtccacataaaacctacacaagagcatgtaaagcagcttcattcatgatgccaaaagttggaagcaacccagatgtccttcaatacatgaatggataatctaactctgatacatccatacaatggactattattcaccaaaaccacaaaggagctattaagttataaaaaggcatggagaaaccttaagtgcatactgctaagggagagaaggccatctgaaaaaaagcaaatactgtatgattctggctatgtgacatgccagaaaagccgaggatctagcaatagttgagagaagtggttgtcagggttttggggagagtagaggagggatttttagggcagtgaagctctttggcatgatattgtaatggtggatacatgtcattatgcatttgtccaaatccgtggaactgtataacaaaaagagtggatctttgttttttgcggtttgaagacagggtctcactcccctcacccaggctatagtgcagtggtgtgatcatggcttcctgcagtctcaacttcctgggctcaggtgattctcccactacagcacgaaaaatattaggtttggttttaagaatgaatctactaaaggaaaagataaaagctggcaaatcctgacaagctctgttatttcagagcacaaactacctgccatgactgttctactacaacagcttttcataatcacacttgaaaagtaataccagtttttggtcaaccttccttttttggtgtagtgctacgcatttgccctaatttcatgtgttttaaag

SEQ ID NO: 704 - DNA, 11683 bp, Homo Sapiens
gtcccctgcctgaatccgaacatgctggctcctgatcctggatttccagcctccggaactgtgagaaatcaatgtcagttgttgagaagcacccagtttatggtgttttgagacagctgactggactaaggcagaacgaaagaggggaagactcacttgtttcttcacaggattaaacaggtgagcaggtggatggaaagaagggggaggagggaaaagggggaaggggagacggacaggtcaaaggagaggagaaaaatggactttctttttacataattttctgtatttctgctttctgtaataaggttgagctgcttttgcaataatagtattacaatttatgtaaagcactacataaaaatattaaacaaatcttccactgtgctcgtcacaaaagcattagttaaagatctaactagggaggccaggtgcagcggctcacgctcctgacctcaagtgatctgcctgcctcggcctcccaaagtgctgggattacagccgtgagccaccaagcccagctcccccactcttgtattttaatgagcagttagcaggtgttccacccgagggggcctcacccaggtgccagagggagcacaaggcctaggtttgtgcaggcaccggctgcagactggccacagggctctcccatcctaggcccctctgggacatgctgggcaccccccgaaggttagcctgccatgaatggcccagtgagctgggttttggagttcatttttaaggagctgtttatactcggtgagacaggagcagcctgacatgcgcccagaacctcctgcccttggccccacaccgccctccccactctctctgccctctccacactgtgctggtcccgctgcccactcctcagagactcacccccggctgccttttggtgtctggccaggtgcattagaggtccacccttcaggatgcacccctctacccactacgccatgtgctgaccccaaaatcctggggtgcagagccagagagtggtgaagacacgctggcagcccagatgtgtgcagccccagagctcttcccgtccccccgcatgcgcgtggatagcatggctgggacagatgctggcctccagccccacggtgtgaggctctctcagaatacctgggtcctggggaggcctcagccaccattgcctgtgggactggccaagccgctcagcctctcttaagcctgcactcacctacagataatgatccctgccgggtgatcatgaggggatggcaaaagagaaagtgcctggtaaatgtgtgtgtaaaagactggtatagcagcccagtgtgtgccaggctcctaacccaggcagccttagacaggggaggccaggctctgagagcagatgaaactagggttcagagattccacctgggagcagggtcaagctgccctctggtgccccatgttcgctgccgggtcagagacacgccaccttccccctcgaaagcgcttcctcccgcagggcaaatgcttccgcagccccagtggtcatgctaccctgcagccactgtagcccctcaggcctcctcctttttacttttttaaaaaattgtatgatttttaaattttttgtagagacagggtcttgttatattgtccagactactcttgaactcctgggctcaattgatccttcagccttggcctcccaaagtgctgggattacaagcgttaagtcaccacgcccagcccaggactcctcctgagccaagaggctggggcctccaggtaccagtagggccggaggcctcaggaagcccctggtaaaggagctcccagagcaaacaaggtgaccagcgtgcagcacacaggcggggagtggggctgtggggtagcccctggggaggctgcacagaggagctgtttcccgctgccccttcccaatgccagagcccatcagggccgacactgctgctgcctgtgggcaggacaaggtgaggggcacttcctgaggaagaggggcttagaggccctctccccgaaccctgggccagcctctggggctgccatctcacagacccttgatgtgggggcatgggcttcagcgtgactccctggcaggtgccacgtgctcaatgagctgatctaggtgctgaaagggagatagcaaggcgggcctgagccctagcttgaggacttctggggcatggcttggggcagataacacaggcaactttggcaaaagtaaagagagacttcctggacatgggggctgttgctctgtactagaatgggctgccaggtgatgtgttccagtcgggtggcactgattctcaaggagaatcgcttgaacccaggaggtggaggctgcagtgagctgagattgcaccattgcactctagtctgggtgacagagtgagactgtctcaaaaaacaaacaggccagactcggcggctcatgcctgtaatcccagcactttgggaggctgaggtgggcggatcacctgaggttggaagttcaagaccagcctgaccaacagggtgaaaccccgtctctactaaaaatacaaaattagctgggcatggtggcacatgcctgtaatcccagctactcgggaggctgaggcaggagaatcgcttgaacccgggaggcggagattgtggtgagccaagattgcgccattgcactccagcctgggcaacaaaagcaaaactccatctcaaaaacaaacaaacaaaaattgcaaaaatagtacacagtaccacgtaccctccacgcagttccccctaatgttaacgtctcgcgtacgtaaccgtggtgcatttgtcaaaactatgagattaacattgattcaatactatcaccaactgcagactttcggtggatttcaccagttttccactaatgcacttttactatttccggatccagtccagggcgaccggggtgcatttagccatcgtgcctcctccgatgtgagatggtttctcagttctttctcggttttcatgaccttggcccttttgaaaagcagtgacgaggcattttgtgggtgttcctccatttgggtttgtcagatgtttttttcatgattaaactggagttctgcatttttggaaagaataacatggcgatgaagggcccttcccatcatgtcatatcaggagtaggtaatttcaacacaatttatcactggtgatattaaccttgtttcttgattgaaatgatgactgcaaggtttctccacggcaaagctgctatctccctttccatactttatttgttagaaatgtgtcactaagtccagcccacactcaaggggaggaaaattaagctccatttcgtggaggggagttctctccatatattatttgcaattcttctgtacagaactgtacctttgcttccatttgcttatttacaatgcattttcgttatctcctgtcccctccctctaagctgagtggctaggtgagcccctcccctggggcatgtgctaagggagagctccatccctgtgctttctccttgcatttcgtgaactataccataatcattactttccttgtgagcttccttaccaagggacagtttttaaaaagtcatttatttagtagtcatcggcaggcacctttgtcaagtatttttctgagcatgatctcattttactcccatgatgtcctgtggttatagtttccatccccattttacagatgagaaaacaggctcagagaggttaagctactggcccaaggtcacacaggaactgtgtcacacccctctctccccagtgcccagcccagtggctggcagcatatccggctccaacaggaacttgcttactgaagagcagcccacacgtgaatgggcataaaaaagcaaaacagcaaactcccaggtggttgtccatcactgcctctgggagttgagcctatagtcagggagttcagtgagttcagtccagggtcttgccccctcctgccatggcccaacaccatcaaacagtaagaggggtccttcttgtagtagagcgacagctcccactttttctttttctttttttcttttttattttttttaagatggagtctcactctgttgtccaggctggagtgcagtggcgtgatctcggctcactgcagcctccacctcctgggttcaagcgattctcccacctcagccttccaagtagctaggattacaagtgcacactaccacacctggctaattttacccactttttcaagttcccacacagcagtggtaaactggggagaggacagctagggttagtgaaaggaatgacgattccgtccaaactgtgagtgccagatgattgcagacaggcagactgtgcttctctcagctccccatgccatgcagagtgacccagagtgacccaacgagacccagcatggatctatgagtgacactgagccaggaaggtgtccagggaggggctgcagaccaacctgggcacgaggcctctttctaagcccaccctggttaagtgctttgccagtttctaggtgaggatcagcctcagcctgcactgggcctactcagtaaaggtttccacggtctttggatttggagcccccaatttagggcagagacaagtataaactgaccaagcaatagaagagatgcccacatgaggactcctgggaggggcactgactgcagcctgggtggcggctcctgggcagagggggagctgctgtggctacggaacaggccagcaggaggagccagtggtgatgagtgccctggtgccaggaaagcccctggcagagggcctggcctgtctgggggaggctggtgactcctggttccaatgtgctcagctctgagccagaggccagcctgcctcagacggggcatttccttcaagtggttaaaattcgtttttgtgctgagtcaggaagctagccggcttgggcctccccacctccaacgctgagtggcacacagtaccagtcatcagcctaagcagagacctgggtaagtgccccctggctctgcccaggggacaggaatgacagcagcatcccaacagattcctgctcaggccccgcagggatccacaccaagtcaccctgtgagatgtttctccactggtcactctgtcagtgccttgagctcctggcctggctggccctgctgccctgtctgcgctggtgccagcactatgctgggtcactggggaagtcgggctggcaacatacccagatgcaagcagttggctgagcagatgggctgggtagccacgaggacccttggaagcctgccctcccaggccagtcggcggtttgttctgttgcccagagacatgctggcctcctgaggctttcttctggggctgctcctggggcactctgtccaagaggtggcagggtggcactgcagtgtggttcggggtgggactcagcgtgagtctggaggcagggcatccagtcattcctctgcccacactttgagtaactaggacaggctgcttctgttctctgtgtctccatttccctttctgtaagatgcagagattggactaaatcagtggttctcactgccgcgattcctggaccagtggtgtcaacaacatctgggaacttattagacatgcatatttggccaggagcagtggctcacgcctgtaatctcagcacttagggaagccgaggccagcagatcacctgaggtcaggagttcgagaccagcctggccaacacggcgaactcctgtctctactaaaaatacaaaaattagccgggcatggtggtgggcatttgtaatctcagctactcgggaggctgaggcgagaaaattgcttgagtccaggcagtggaggttgcagtgaactgagatgatgccattgcattccagcttgggtaacagagcaagactccgtctcaaaaaaaaaaaaaaaaagacatgcagattcacagaccccaggaagacctgctcagtcagcagccagtgggtaggcccggcaatccgtgttttaacgcgccttctgggctcatgctggagaaccactggcctggacaaaggcctaagcgtcttcctaggcttatttcaattcactgggcacccaccgcataggaggggcttgtgccaagagctggagaatgcaaaggcggacgaggtatgaagctggtaccaaaagggcacctctgtttcctgggtggctacctcctagctgtccttaacacccagctcaaatgatgtcttctttgggcactgtcccagaccagccctcccaccagttcctcagacacgagtaatcgggtcccacctcttcccccgacgcctgtgccagcacggctcttggtatataggatgtaccattgtttgtgagtcagtttcctgctgaacagtagggatgggaagggccgagggtggctcctgttcctccacggtcccacagccctgagcaccaaggggtcccattccccaacatagactgtactagcccagcctctgcaaggcccctgccaagtgcccatgtcctcaaagaagctttcagggcccactacacccatagccccattctggggctttcctttggcaaaagttgcagattgggccatgtggcccccctactctgagcctaaaagcctaagccaacctggttctccctcttgggaggtttgaagacgtatcacacagtgaggttgtagcgcagcctggagacacagaaagaaggccgagtgcagccactgaggcagccagaaccacgtggcaggaggtgtgtccagtgtggggaggggtatggcagccacagcaggaacaaactgcactggcctcctcaccctccctggagtgatgggactgagcacccccttttgtgcctggtgggagctgcccacagcccccgactctgggccagcttacaaggactcagcacgtgctcttagcagcctcttttccaggggcaggcagctgggacaaagcagcactggacccgagctggagggatggatcccgggccctccactcactggccgacaatgacgggcaagtggcttcacctctcgtccctcagtgacttcatctataaatggggctgaaatcagggaatcaaaaggcatgaagagctagcccctagcatgacacttggcctacttttggtatttaataaacgtcttctgacctggtcctccttcgtacctcaaccacatcagacacagcgtcatgatgatttttcccctgagcaaagtggctttgtgtgaagttgctaggcctgagtttccccatctaaaatacgcaggttgacctggatgatctgtgcctcagctacacctacagacctctctgctcaccatcatgagtgcccctagcaaagggagacaggggccctggggtgttgggaggaatggacactcaatttccagtcaggcattgaacaggtcagtggattagtgggtctgtgattcattcatccatccattttgtcaaccatttgttagatcatttgtcaaccagccagccagcccagtggctggtcagctcacagcatattctggtccttgtactgcttccagcccagtaaactcaaccaaagagaaagagaacagaagaatgagaataaacaaactccaactgcccacaacaacacactgagtgaaagaagccagaccccaaactgaacatactgtatgattttctttgtattataaaagtgtcacacacacacaaaaagtgtcagtacatccaaaaccaaccgaaagtgtcagaagccatgataaggattatcctatgcaggggatcagggaaacggtaagtagtgactggacggcagctcatggggcttttgggattctggtaatattctgtttctaaatctgggtgctggtgacacagtgtttgcctagcgaaaattcattgaattgtacatttaagtttttacactttcctgtatctacgctatgctatagttcaataaaaatttacccaaaaaaataataaaagaaagaaaagaaaagcaagaaaaagcaaggaaatgcacagagcagttaactcagcaattccagttctaagagctgcttatcctgtagttatccttccaggtgggcaaatgatggaggggcatgatgttcctggaaaactggaaacctaaaagtcttggttattcaaccagaatgttaaataaacaacacatccatatgatggaatattacttaaccattacaaagtatgatcgttatgtaccaattgcaataagcccttagactgaaaagtcagtaagtgagcccaggaggtatacagcactaccctctgtagcagcaagcgtgcatagccacaggctctctctggaacgacacaggagaaagtggtggcattctggcctgcaggctcacgctctccccttaggggatgttatctgtggccacatccagtctgcctgccagaccatgctcttcccgagggtctacggagcctggtgccagtagtcttagttcagtctccaagtgaatgattcgcaatagtctgtagcttacaaattgccatccctctgactgcgggcagggccagattcaggggtttggcgacgaccacagactgtctgtccatctggaagatgggctagatgtgcgcagaacaggggctcatggctgaagagggcacagttcccacatgcgcctgctgtccaaggagcagaaacagaccctggggcaagagaagccagagtgccagttcagggagagctgctgccgccttctgtcctgcaggaaagaagacttggcaaggtcacaccggcaaaacaaggatttgtatgcaggtctgactccaaagcccgggcatgctgccttctgcagaggccaatcagggagggcttcactggggagtcatatgcagtctttttttctttttttttttcttttttgagacggagtttcactcttgtagcccaggctggagtgcaatggcatgacctcggctcactgcaacctctgcttcctgggttcaagcgattctcctgcctcagcctcccgagtagctaggattactggctgattttttgtatttttagtagagacggggtttcaccatgctggccaggctggcctcaaactcctgacctcaggtgatctgtctgcctcggcctcttgaagtgctgggattacaggcgtgagccaccgcgcccggcggtctcatgcagttttgcaaagtcaaagcagacgagggttggcatgttccacgcagaaggaatgctgtctagaaacagaagagagtggcgtgaccttgagagtacagggttctgtattgggtcagtgggggcaggaaggcagcagggaaagcaatttgggaaactggtcagaaatgatgcaggaagtgctggctggagcctggctacaaagactcatgggttcctggccatggagcctgaagtcagtcctataactgtttggattccaactgacggcttgaatacaggttcagctccacctctgcttccagaagatcattctggcagtgaggtgagggcagattgtagggcgtctggctggagggagggagacctgttgggaggcagtggcaacaattcaggtgagcaggtggtggccaggacaagggctggcgtgggtgacataagagtttgagaggaactgagaaggaagaagggcatgtaattggcggaagacagcaactgtgcgaaagggaggaggtaaaggtgacgctcaggtttctagatcaaggaacagggtctccagttgtacccttcacggaggtgagaaatccagatttggctggaatccgagttcagttttttgtttgtttttttgagactgagtctctgacgcccaggctggagtgcagtggtgcgatctcggctcactgcaatctctgcctcctgggttcaagcgattctcctgccttagtctcctgagtagctgggattacaggcgcctgccaccgtgccaggctaatttttgtatttttagaagagacggggtttcatcatgttggccgggctggtcttcaactcctgacctcaggtgatccgcccgcctcggcctcccaaagtgctgggattacaggcgtgagccaccgcgcccggccctgagttcagtttttttaaggacacaattagaggtgctcacgggatgttcaagcagggaggctggtggataccttcgattcgctcgttcacctacgtggacttattaaacagccaggctccctggccttgggagagtccttctggtggggagacagatgataaataactgaagtaatggaaaaggggcagttcaagaaaagtgttgtggaggaagaaaacaagaaagcccgccagaaggggactggaggtcggccccgagggtgtgtccgctagagggggcctctccaggtggactgcgggtgagagtaaagggggcatgtgggggaaaagcattctagggaacagcaagtgcgaggacctggagacggcagaggggctggtgggacaggcgcccaagaggaggcccaggctgtccctccggggcgtggggagaggcatggggctgggtccctgcaggagctcacaagccacagtggggagcagaagcgttacgctgagtacagtgggagccactgaaagggttaaagacccctgggggtgctgagtgggaagaggctctgggagctggagtggacgcagggagaccagttataaggcgaatgcaggagtccaggcaaaagagaatattccagtgtgtatcttaagacttaactttttacacacagaacaccctgcgcccctctcagagcctccggggtcttcatgcgagcagtttatcacggttctttcgtcttaaaccctcttactatttcagcaaacaccctctcctcagcctggtcaacccctctgcccaacccgagtgggccccgaaggaacaagtggggaccagagtcctgctcatgtgagtggtggggcccagcccgttcccctaagaccagaattctctcgctcagagcaaagccccggggtgccgggattctctctctgctcccgctccctggatggagcttttaaaaaaggaggattcctcactgcggcctctgccccttgcactgagcgccaacccgcatcacagctcagcaaaggcgcgcgcagtgaacagacggaggaggggtggctcctcgctgagctgaaggctgcggcgacgaaaataaacagcatggttcctgctctccacgaacctggcgctgcagacgtgggcaaaccacaccaagagacgcgagcaaccgaaatatagggagaaaaaaaaaggtgccctggacagcgggctagatgtctcctgcaggctcgaggacttcccggagggggcggcgttttctcggggcctgggaagaatgggcgggtttcagcgggcgccttctgggtgactgcccgtttcggcttcccctgaccccgtaacagagcggaagaggcccagagacgccagaggaggggcgtcagcgggacactcaggccaataagctctgactcccgctgtctgcaaaaatgaccggatgcaggaatgtcacctagaaccggccagctttccgacctctccggtcaaggacgcattcctaagagacgaagggagaatgacagaagttaaaaacaaccaaacaaaagccaggttgaggcctctaggtgggtctccgctaccgatggattcagccggtggggctgcaggaggttcctataagcgtggtcccctctccccgcaccgagtccggccc

SEQ ID NO: 705 - DNA, 1397 bp, Homo Sapiens
ggctgaggcgtgagaatcgcttaacctgggaggtggaggttgcagtgagctgagatggtgccactgccctccagcctgggcaacagagtgagactctgtatcaaaaaaaaaaaaaaattttttttaactgtaaaacggcctcaggcaggtccttcaagactaatgctttaggcctccacgttcactcacccacccacagcaacttcccaccctgcaagctccattcataattcatgccctgtataggtgggctgtactttttttttttttttttttttttgagatggagtctcgttctgtcccccaggctggactgcagtggtgagatctcggctcactgcaacctccgcctcccaggttcaagcgattctcctccctcagccccctgagtagctcggattacaggcgtgtgtcaccacacctggctaattttttgtatttttagtagagatggggtttcaccatgttggccaggctggtctcgtactcttgacctcaggtgatccacctgcctcagcctcccaaagtgctgggattataggagtgagccactgtgcctggcccagaattcttacaacaatgaaaagacaacccaattaacaaatggccaaaggacctgaatatatagtttcccacagaagatttgatttctgccatgaattcaaagatatacaaatggccgatagggatagattctcaacttcatcagtctcagggaaatgcaaatcaagaccactgtgacagaccacttcacacccactgggatggctatttaaaaagacagctaacaagtgttggtgacgacatggagaaactggaaccctcatactctcttggcgacgatgcaaaatggcccagccactttggaaaacactctgggagttcttaatgttcaacatagaggtaccctatgacccagcaattccactcctaggtatgtacccaggagaactgaaaacacatgtccacacagaagtatacacaaatgttcatatcaacattattcctaataggcaaaaattgaaagcccaaaatgtccatcaatgaatgaaatacagtctatttatacgatgaaatattgtccataaaaaggaacgaagtactgacgcatgctacaatgaggatgcaccttgaaaacaccatcttaaagaagccagtcacaaagcacacagagtgtatgtaattctgttcttacgaaatgcccagaataggcacatttagagagacagaaagattagtggctgcctggggcaagggaagctgaggagtgacactaaggatttggggtttcttttggtgggaggtgaaatgttctaaatgtgattgcagtgatggttgtacaactctgaattgtacacttaacggattttatgggatgtgaattatagctcagtaga

SEQ ID NO: 706 - DNA, 18004 bp, Homo Sapiens
agtggctggagtggaagtgaggaagagggagagctcctgggcaccagaatgaatggggagggtcctttagggcactgtgaggccattagcttttactcctactgagactggacatcccaggagagtttcagagcagagaagtgctatgactgctcttgaagtttaagaggaccaggtggctggctttgctgtgtgtcagagaacaggagcagaaacagggagaccagctgggaggtgactgcaaaagtccaggtgagaggcgatggagctagtgaggagtgccggaggcctggtgtattctgacgacctgagtatttgcagattttggtacctgcaagaggtcctggaaccaataccccatggatactgagggacaactgtaaatagtgaagaaggtccttgcttcccctttgccttccaccatgattgtaagtttcctgaggcttcccagtcatgcttcctgttaagcctgcagaacttgtatcatctttcttgctgcccttgaagagtggtgtccagtgaatctttcaaagaatgatactgagcttcattgttgatgaacaaaaatgcaaatctcacccagagcatgcaggaacatgctataatcactacactcctagaatgtgatctctttcaatattgactgcatccatgccttccacacacttgcaccagttgggaggatggagatgtcatctgggcagagggagaagagcagtaccattcagaggtctgtccctcttaagatatattctctctgtcaacctagaactcaaagggctgtgtgaaaagtttactgtggaaaaagaaattgaaaaaactgccactaagtagcaatggaaggacttttcccgctaagatgaggaactgctcagatcaccagctgcttcaggttaccagcccacacctgtctgtctcacctctgacaaccttgatataaattaaacaatgaataagaacaaaaacaatttaaaactgcgtaatggtccaaaccaccatggatggtgttctgacgatgatacacggggtgaggtctgactcatgagccgctgtccgtgatgacttgacattctcaaaaggaaatcccgaatgttctcactgcatgctgctgcaggccctcatggcagggcatccacaccactggctcaggtgctggttgctccagaatctctcttcagctggcctttttctactgaactgtctgtgagaacatcactgcaggcacggttttctccaaccataattgctgctgccaaagccacctcggacttgggaaagggaaacaacactccactagagagcgtagaatcttagaattcatctacttcattctcctcctggtactctactttcttctacaacgtcccagccgagctgaggtctgagctgtgctgctcaaggctgtcccatgtgaatacagatgcggagaccctgtaagggtaacagaggaagctgtgaacccaggggaagaagataaacttgtggacatatgtgcaaggagcaattttaagtatattgcactaaccaactcatgatctgtaactcctttgttaaggaaaagaatgtatatctacgtcaaacttccatttcagaaagccgaggtcaaaataatgagtcctggggaattcaaacttgtgttaagaaaatgtgtcccagtgtgcaatggctgcaaacagcagcttccttggtagtgtatgcagcctgtttgttgtacgggttgctctaaagggccttggagacagtcctttcagatggatgtacatgtttttgaccttgcactaccccagtgtaggctccaaacaggcatgcgaggtgcctttggaaagccccggggcactgtggccagttggccaagttatcatctccatccgcaccaagctgcagaacaaggagcacgtgattgaggccctgggcagggccaagttcaagtttcctggctgccagaagatccacatctcaaagaagtggggcttcaccaagttcaatgccaatgaatttgaagacatggtggctgagaagcggctcatcccagatggctgtggggtcaagtaccttcccagttgtggccctctagagaagtggtgggccctgcactcatgagggctttcactgtgcttccccctcttaatactcaccaataaattctacttcctgtccacctaaaaaaaaaaaaaaagaaaaagaatgctttaacttcaattacccctctctcttatgtacgtttagtctgttattttagttttatcctgattccctcgcataaacattattattatattaaaaaaaagaaaagaaaagaaaatgtgtagagccgggcacggtggctcatgcctgtaatcctagcactttgggaggctgaggtaggcggatcacaaggtcaagagatccagaccatcctggccaatatggtgaaaccccgtctctactaaaaatacaaaaattagccggacgtggtggtgcatgcctgtaatcccagctactcaggaggctgaggcaggagaattgcttgaacctgggagacggagatgcagtgagccaagatcatgccactacactccagcctgggcaacagagtgagactccacctcaaaaacaacaacaacaatgacaacaaccccaaaaacaaacatgaataaatatcattctccaataaaatcattcatgccagttagggaaccagttaggaggttgttactggaaaccaggtgaaagagattttattggagaatgatatttattcatgttttccctaatgaaccctttaactttactccagttacccttaagattgagttcaagcccttggtatggctgacaacactcagtgagatacggccctggtctcctaatccaatcccatctttttcctctgtcccctctttcaccaacttctttcagttctttgaacaggaaaccctttgtttttactcctttacatcagttgctcccttaaaaactcttcctcattccctactctgccctgttttaggtttcagcttagagtaattttctccaggaggtttcccgctggcctccccaatgggagttagtggcggtcaaagcatgctgttctcatcacagcccttagagcactgtattgcaaaagccatttcagttgtctacgtcttctgctagattgggggtttcttggtctttcttgtttaccattgtatccccgcagctagcatagttctagcttgggattaggtgctcaataagaacctgatgaatggccagacagatgaatgaaagaaggttttccttttctgacaagagaaggtggtgaatggaatagttgggaaaaaatgtagtggctaaaaataaagcaaataaactttttcttacctttgaccagctatatttttcttaaaatagggaaaaaaccaaaaacaaaacactgagaaaagtgtttgctgattggttagttttaaatttttccaccaatgaaatattactgctatgtgcctgttgcttctgttttcttttctattaatatcatgggctttttttttttcacaaaggaatttgttataaaaggacattattcaaggtatcactgtatagaacctgacatttgtaaatggtaacattcagtgaatataatcacttaaactccagagtagataatatacatatatattgaaacctagaggcctggggtttggtcttgtttgtatcattatctgtgtaactagcattaggacattaaactttctatgtttcattgcatttaagtaaatgcatcatcttcaaaatgaactgatgccttttctgatatctcacatgtgaagatataatgaaatgactcatataacaatactgtaagctactctgtaaaacataggtaccaagaagtgtgataggaagggtaacggcccagaagctaggttgccagtagctagtcccattcatactgataattatctactttttctctattgtcttcttatcaaacaaaataaaacataagataagaaggttacacagaatgttgttttgagattccttttagactttatcttttaaaattattattattatactttaagttttgggatacatgtgcagtacgtgcaggtttgttagataggcatacacatgccatggtggtttgatgcacccatcaacccgtcacctacattaggtatttctcttaatgctatccctcccctagctccccaccccatgacaggccctggtgtgtgatgttcccctccctgtgtccatgtgttctcattgttcaacttccgcttatgagtgagaacatgcagtgtttggttttctgttcttgtgttagtttgctgagaatgatggtttccagcttcatccatgtccctgcaaaggacatgaactcatccttttttatgatgcatagtattccatggtatatatgttccacattttgtttatgcagtctatcattgataggcatttgcgctggttccaagtctttgctattgtgaacagtgctgcaataaacacatgtgcatgtgtctttacagtacaatgatttataatcctttgggtatgtgcccagtaatgggattgctgggtcaaatggtatttctggttctagatccttggggaattgccacactgtcttccacaatggttgaactaatttacactcctaccaacagtgtaaaagcattcctatttttccacaccctctccagcatctgttgtttcctgactttttaatgatcaccattctaactggtgtgagatggtatctcattatggttttgatttgcatttctctaatgaccagtgatgacagcctttatcattctaggaaatgaaatgagtactatattctgtacataatcctattaaatttcttaaagaatttgttgccatttaatccatccttgcgtttcatgggttgctgtagttcagtggctgttgtagggaatttgtctcccttctttttctatcccagttattttgtgattttttccagatgtgcatgttctccattgatatatctatgcattgtcttagaaagtttaaaatctacccaggaatctatactagctaaaagctctttgagtgtcccttcacagctatacaagatgtttttagtaattgtgttctgtagagctcagcagctgttatgttacccgagtatttttttttctttcttggcttttaagttgatgtttggaagtctattcccaagtgctcagcctaaaggagagacagttttctgttccccctgctaatgctaaacacacaaataaacaaaacagaacaaaacaaaattccaattaaacagtctgggagattctagttgaatggtggatattagcatctttcaaagctagaccacctgtgcctagacaatttgtggctttctattcttatgtaatacaaggaatagatgtctggcaaaacaaaaaagaatttagaaagtagggatgaaacatgattccttttcagggaggaaaatcacttcattcaagtaccagcttagtttcattgctgcatttgaacctccaaggagagaaatgtggagcagttgatccacagttgtaccttccattgttggtttattaaatgggctcttttgtgcgtgtgtgcaatttcattcagaccgttaatcactacttggagtattcttagctttctacaaattgacaaacatagctgtagggaaatctatgtggaaattctgtttttcagaggtttggcagtttctctttaatgagtcctcagggtatctcaggtttcactaatttgtgtttaattagattggaaaaattcgggcagtaagcgacaagaaccttctgccccataagttggagaaaaccatcactcaggcactcaacaaaaccccttccaaatacatgatgtaatacattcactccagaacagggtatgagccctaaaggatgattcagacatagaaacaaaagttgctgttagaagataaaaagaattatcagtggatgtgtttttgcttgccgctttgacattgctgtggcaggcaagagcaaaggaagaaatgatgccctgagctgatgaaaacaaattccagaagcatttatgaccaagttgtggttagaggaacagaatgaaacataatttttcaaagtttccagaagggcttgtgcatgctgaaacataaccagaaacaatataacatgctacaggaggaatcagtgataaaagtgacattccccacatagacctagttatttacaaagagctgtaagaacgaagggctctgaagcctttaagatgaacaatgttgtaacaggaaaggggtcctgattcagaccgccagagagggttcttggatgttgcataagaaagaattcagggagagcccatagagtaaagtgaaagcaagtttattaagaaagtagaggaataaaagaatggctactccatagacagaacagccccgagggctgctgggtgcccatttttatggttatttctggatgatatgataaacaaggggtggattattcatgcctcccctttttagaccatatagggtaacttcctgtcattgccatggcatttgtaagctgtcatggcactggtgggagtgtagcagtgaggacaaccagaggtcactctcgtggccatcttggttttggtgggttttggctggcttctttactgcaaactgttttatcagcaacgtctttatgacctatatcttgtgctgacctcctaactcatcctatgacttagaatgccttaaccttctgggaacgcagcccagtaggcctcagccttattttacacagctcctattccagatggagttgctctggttcacatgcctctgacaatgtcatatatagagtcagtacagcttcaggattaaaaagctagactccagagtcagacagacatggctgatatcaaatcttgcttccactgatcttgcccaactcacttgacaattttgtgccacaattttctcgttagtgaaatggaataatgattagccctttatcatagcatcaatttgaggaattaggaaatgcttgtaagacattggtaagtattcactagtgtgtgttaacaaatgatgtctattattgctattgttattaacaagatattctggctgtggactccatgtagttccagaacatttggtcacagactgaacatgtccaaaactgtagtctgttaaagcctagacttgggttagaaattgcattttccaaagaatttaaacattgcaggttgtactttccaaagatggctgctacaatagttcctatcccacatgctatgtgataatgtgaccttgccactccttccatgaggaggtggggtttatgttttctcccctttgaaactgggtaggcttgtgactacttcaaccaatagagtatggtagaagtgacactatgcgacttcagaggccaggtccaaaaatgctttcatttgttgcactgaaatactccttctgggagtcctgtctgattcccctggggctgccatgttatgaagaagccaacccacacagagaagccacagatgggtgctccgcttggcagtcttaacctttgagccttttcctctcaaacaccagatatgagtaagtcttcagataattccagctccagccattgatgattagtcttctcatctgagaccccagacctcatggcagagagaagccagccctaatgtctcctttccaattcccaataaatccttgaacataataaattcttgtttgaagccactaagcttttgggtaatttgttacatagcaaagaatacctgggatagaaattctccctggtctggccagttctcccatctatggattttccaacttttctcaatcaagtaattagcatttaccatggccttttaatgcaagtcactgtgctagaacagggataagccaacatagttaaacagaaatatacacaaggataaagaatacttaggaatcctatggtaagaactgtgtagcatagagtagtgcaggcaggactatggtgtaaacttaaaagaggctgagacaatctgggaaggcttcatggtaaagaggcttgcatagggccttggataagtggtactcggataaatagaaaagggagaaaatgaattcctggcaaaagtgtgaaaaaatgttttggaaaaaaaaaagatttaggcattgcctcttataattaatctgttaaagtcatatttgtcttgcaaaataatatttacaagaaagaatgcttttagatatatttctaattctaagagaatttacttagtactttatagaggttgagttatgtcagtggtgtcttaaattggactaatttccataggattgatcagcaaactttgcctcctatgtaaacataatttacaactttattagaacacacagaattttctttccttttttttttttgaaatggcgtctcgctctgtcgcccaggctggagtgcagtggtgtgatctcagctcactgcaagctctgcctcctgggttcacaccattctcctgcctcagcctcctgagcagctgggaccacactttttttttattattatattttaagttctggggtacatgtgcagaacgtgcaggtttgttagataggcatacacgtgccatggtggtttgctgaacccatcacccgtcatctacattaggtatttatcctgatgctatccctcccctagcccccaacccccagacaggccccagtgtgtgatgttcctctccctgtgtccatgtgttctcattgttcaactcccacttatgagtgagaacatgtggtgtttggttttctgttcctgtgttagtctgctgagaatgttggtttccagcttcatccatgtccctgcaaaggacatgaactcatccttttttatggctgcatagtattccatggtgtatatgtgccatgttttctttatgcagtctatcattgatgggcatttgggttggttccaagtctttgctattgtgaaccatgctgcaataaacatatatgtgcatgtttctttacagtagaacggtttataatcctttgggtatgtacccagtaatgggattgctgcatcaaatggtatttctggttctagatccttgaggaattgccacactgtcttccacaatggttgaactaatttacactcccaccaacagtgtaaaagcattcctatttctccacatcctctccagcatctgctatttcctgactttttaatgatcaccattctaactggcatgagatgttatctcattgtggttttgatttgcatttatctaatgaccagtgatgatgaggtttttttcatacgtttgttggccgcataaatgtcttcttttgagaagtgtctgctcatatccttcgcccagtttttgatggggttgtttgtttttttcttgtaaatttgtttaagttctttgtagattctagatattagccctttgtcagatggaaagattgcaaaaattttctcatattctgtaggttgcctgctcactctgatgatagtttcttttgctgtgcagaagctctttagtttaattagatcccatttgtaaattatgacttctgttgtcgttgcttttggtgttttagtcatgaagtctttgcccatgcctatatcctgaatggtattgcctaggttttcttctagggcttttatggttttaggtcttacgtttatgtctttaatccatcttgagttaatttttgtataaggtgtgaggaaggggtttggtttcagttttcttcatatggctagtcagttttcccaacaccatttattaaatagggaatcttttccccattgcttgtttttgtcaggtttgtcaaagatcagatggttgtagatgtgtggtgttatttctgaggcctctgttctagaacactcagaattttcaactaattccaacaaatataacgtcttataatagacattcgtcatctcaaagttacacatcggtagtctttagaactgttacatcaaaaaattcttgagaaagctctttgccctttttaggaaatatatttagataaatacccaaattttaatgacaagatatagcatagatatagctataacttacattttataaataacatataaatattcacaaaacaccttccttttaaaaaaacaaaaacaaaaagtaatggctaaaccaagcttttgcgttcttaaggtcctgtgacaacttttcattaagtaccgtagaaatgtgtgggcttgcattttttctttttctttttttttttttttaagatggagcttcgctcttgtcacccaggctgcagtgcaatggcatgatcttggctcactgcaacctctgcctcctgggttcaagtgattctcctgcctcagcctcctgagtagctgtgactacaggtgtatgccactacacctggataatgtttttgtatttttggtagcgacatggtttcaccattttggccaggctggtcttgaaatcctgacctcaggtgatccacccaccttggcctcccaaagtgttgggatgacagttgtgtgccaccacgcctggcctggacttgcattttaactataatttaaaattttttgcaaccggtttgaacataattagtggctggagtgtatcacttcttaaatagtgaattctgctgaatagctcaacttcctgctcatgcttacattggggcatcctatctccctttaagtcctcccttttgaccttagtccttctctttggatagcatagaataaggattctctttcctgtgtgacaagcattcaattgctcaagggcagcacctataccacctttgtgccttctcttttggctaacaattccatgtcttctcatatgaccatctttccagaaccttctttatctttattgttgtcttttaaatcgtttccagaatgtcattcttaaaatgttgcctagaacaaatgaatactctagctgttaataattgccttgattatcagatagtagatatttagcttgatctaagtctaaccattgggaagcgattcctttttttttttttaattttggaaaaagtgttttatgacaactaatttggtgatataaaaatgtccatcagcttggattctttgagaacatcccaaaatgtattggaaatccataatctctgtatccaaaggaatctttgaaactttggcatcatcctagatattaggtagattttcttgggaggatttttggctaaaatgagtcacttacctcttccttaatctagaatttttttttcaggtaatctagagtctctattatatatgtgtgatatatggtatacctgggtctgccgatagacagacaggccaagataggcctgcagtattatctttggttattccaatgccatagccactagccccatatggccatttacgtttgaagttaaaaacatttgaataaaattcaagtaaaaatttagttcctccattgcaccagccacatttaagtgctcagcagtcacatgtggctagtgactgctatattggtcagcacagatatagatcatttccctcattgctgaaaatcccattcctgccacctagataaaaatgtagaaaatgtgaaaatttctgaatatttaaaatggaaaataatatgatgaaaatggatattggcataggctaggcattaaaagcattaactattttattattttgtataatgcctagttcaatgttttacaagggaagcctattgaataagactttagctttgtagacaggccacctgagttcaggttctgccttcaccattttctgcgtgatcttaacctaggctttgtttccttaactataaaatagttttaatgaatttcttaagatgatcattaagctcgaatgaaataatgcttgtaaaagtatttagcacaatgtctgacacatataagttgttaatataaacataaggcattattgcaattatttggagaaatgtaattattagctccaaagtactaattgcagaatacgtgcataaacaccaacacaatataacactttattaaataaattggacttgttaaaaagcaaacagaaagcacagatacaacagcctgtgccacctaacttccaggagacacaggtgtagtgatctgggtgggtttccaaagccttcctcatttggtttggttggtaggggagcacaagcacttccttctcctacactattctgtgttgagggaatgcataaaccactgacaagtctccaagaacatcttcaccactcaggttcttagaagtgatgaaccaaaactccatctttgtatgtgtcaggggcccatatatcaagatgtatagggtcttagtactggtttgggcataattatactcagtgtttgggcctctgctaaaattctaagacgataagaatatcagtttaagttctgttacagttgttttcatgaagcttgtaagattgatatttaagtggacaaagtgggaagtagtcagttttcagggctccaggggtcatcactttgtgctcagagtacagctgtcaactagtgatttggtgcatttagacaaggaacaggagcaaagggcctatttcaagagggtcatagacactgccttgtgataagtgaatggctagagggtttcttggtaaactgaagtccttttcacatttttagctttttctgtggcaacctgtcttttacagaagctactcatgaactctggcttttcattttcagggttgggctggacattctttgtttttttgttttgttttgttttctgagacagagtctctctccatcacccaggctggagtgcagtggcgtgatctcagctcactgcaatctctgtctctcgggttcaagtgattctcctgcctcagcctcccgagtagttgggactacagtttcatgctaccacgcccaggtaatttttgtaattttaatagagacagggttttgccatgttggccaggctggtctcgaactcctgacctcaagtgatccacctgccttggtctcccagaatgctaggattacaggagtgagccaccgcgcccggccttggacattcatttctgattcactgatcacactgtgtattaaaagaaatgttggtccagtgacaaagaaaaacgacctattctattcctcgccatcacatagctatttggagtaaagtattccaaagtaatgctttactgttcactgtctgtgagaatgatgccatgccccactgtccttgattaaccatttatcatttctcagagatacagagttaggtgacccttcaaattaatgacattctgttcacacataaaattacctcccagttcttgatctgctttcttaatgcccttctgactggctagaaacacttagaattgggcattaagattgaagaatttacttataattatttgaaaatcatataaagagagatggcaattctttttctaggtaggaagcctattggaaatgatgatggtaagcatactggtgatgagaaagcaagcccagaacattcctagaagcatgtgggaacacttggtatctcccgcaaccctctgcttcaaataaacaactagcttttcttggacctatggataagactgttctttaggaatgaactagggagcagctatctgaataagtgatttaatgatgttacgctgttggagtatattccctatctgttgactcgtgccaaagatgccattaataaagctttattcttttgattcttattaaaatacaaagttctcaggatctcaatttccttaccttttaacttgatcattttagaatagatagtctataaaagtggctttaattctgaagtatacatttttttaaagcactcctggaattatttcaggctgtaatcagttaaaatgatcatttagtatatgtttgttattgaatgaatgcatttacatcttactgcaaataaattatacgtccatacttaaaatcaggctttactacagagcaaggaaagagtctataaaagatctaattcttctccaggaatccaataaatatatcttgacagattattttggataagacaccatttcagtactaggttgcttagtagtaatacaagttgcagatggtgtctgcaacttggagactaagaacaaaaaagacaagcttaggccagcgcagtagttcatgcctgtaatcccagcactttgggaggccgaagtgagtggatcacttgaggtcaggagttctagactaccttggtcaacatggtgaaaccccgtctctactaaaaatacaaaaattagctgtacatgtttgtgcatgcctatagtctcagctcctggggaggctgaggcaggagaattgctagaacccgggaggtggaggttgcagtgattcgagatcatgccactgcactccagcctgggtgacagagtgagataccattgcaaaaaaaaaaaaaaaaaaaaaaaaaaagacaagctttacccacttcatagtttttctcgaactcctgacctcaagtgatccacctgccttggcctcccagagtgctgggattacaggcatgagccaccgtacccagccaaataaatatgtgtgttaattagccttgatatatattagccttatttctctttgattatatttaatacctagatcatctatatctggttgcataatgtagcctgaataaaaggaaagaggaaatatgaaaaaaatagcatctattgagggtttaatatagtgctaatcacctcatatagacattttcatgtaatcatcgtagttactctatcaaatagatactattattatatcttttatagataaggaaacagaggctcaaagaagtaatgtaacctgcccaaagtcacatacctagagccagtattatgatattagatggtcttactctagaaccaatagcttaaccattactctagaggaaaaatcattcattgggtgcatatcatatgagctgcaatgttacctaactcacacagagaagagagtcatttcttttcaagaaactgcaggtgatatttacagttccaagaatagtttaggtaaattttgaatgacagagtttcatttggcttcttagcaaggtaatcttttaattttggaagggctttttggaaagcagttcccagagatgatcctggagtggtcctggtaagattaacctgtgttcaagtcttggttctgttgctcaaatgtatgcacatttgggtagcattctattttattcctttatctataaaatgggaccaatgctcatggaggtgtggtgattaatagagttaatatatatactcagtggcctataaaagcatggtgcaaataagtagattcaatagtagtatagagataatcaagagaagccattgtcatattttcacttcttagtacaatgacacatctagtttgtatatctggactacattaggattatcagatctttgaccaaataagatgcttgataaaagtttaaacatgaattaaaagattgatcaaagaccatggacaggctatttctggagaaggctaagatctaatccttctctagcaatccaataaatatatcttgacagattattttggataagacaccattttagtactaggttgcttagtagtaatacagagatggcctctgcatctttgcagaataactagctcagaaaaagtctttccagagctgagatttcaaggtttccatctcaaaagcctacttcattctggattgcgctcagccatcattctttccagttcaccttcagctccaaaagctcacagcagcattatttcacagtgggctttccattatgtgccgactgcacttgatcctggagaagagcactttccaggacttttcctagagtcctagcaatacaggtcatcaaaaacaaggtctgattttccaaagtcaatatttaggaatactttttgctcttggtcacttcaaaaatccaccaggtaactataatggttaaaattattcctttttcctagtaaggaaccctttttgagattggatctttatgcatattttgcagagagtgtctaagggagactcaactaagctccatagctgctatgattgtgaatagttatgagactattgacatgaattagtgatgcattcccacagcccttcactcctttatggttgaatttcagtggatgcctgggggctcttctgccttaagagatcctgtgtcagagccctaggatttctcatcagtcaaaacaccttcaaagtttgaactaaattcacacaaaattaaatgctgcctactggaactataattggttatgacgtgtcttctctgcagtgattcttgacagctttgaacgactttatgtcattaccttctgaggctttgcaaaccaaatgtatcatttgtacaaagcaatgccagggcttggttgccttaaacattcagaagcaactaactgatactagactcttgacttctagtacataatggatcattatgcaatctacaatgaagcccagagtgcaaaatataaatttgagcttttaagatgaaaattaggcacacaggttttctagagagaaaagtatttaggatctacttattggcatctcagacatgaatccatctgtttgctgagtgcgttgctctccactgtggtgccttggcatttgcttcacatgtttcttctgatgtgcaaaccaagcagtaatagcataatattgatctccatttttttttatacacctaggagtgaactcttccattcatttaccatttttgcaagcctataattacaatgctttgatatttggtaaagtaaatggtgcagcagaaattatatgttaatggtttcccatgatttaaatatttaatattctaggttttctatacttgaatgagattacatgagaatattctatttcttttaaaaatctttgtgtaatagtgtaaaatttctttttgttcttggctaagttagttaatgtctcatatatttgatgaaacctaattctaagagtggtggaatttttgatacctctcctttatttccaagacaggcaatattacatagtaattaagaatgtgaactccatactggagtttgaatattggctttaccacttaataatgatgtgacctcattaataaaatgggaaaaatgataatacttacctcccagagttcatttgttctataaacacttgttgaacaccttctgtgtgcctgtgtcagaaaatttgctaaccacccagaatacaaaagtgaacaataccacgtggtcactgcctttctgggatttgcagtcttacatgggaatgttgtcttctgattaccagttcacttggctttattctaaatttagtactgaatttacatttgttgaattatttagtctctgataatcgataacaaatttgactaaatgaatatgaatatactaatttatttacacaatgggttgggaaatttataatgtataaatattaaatttaaaaggacacaaagttcaaagcatgatgtgggccattaaataaaaacaaaccaataagcaaacaaaggacggaaagagaaatgaatgtcataggcaggagagtagataaaatgtaagagagacttgtatggggtattatgagtgagatgaattttcaatttaatatacagaaaaattatgaagaaagcattcaaaagtgttgaggtctatgttatcatggcaaaattaaaagcaaatattcttctgaccttaagaggctgaaattaaaagaaaacttcagtagtcaagaacacagagaatctaaaagtaaatcttttcattttaagcaacatatttgaaaacaaaggaatggaaatatctgtttgatgaaggaaaaaattataataaagtaagcattccacaaattcagttgtttcatacatttgcagttaaagaatattaatcattaaaacaattttatacagctctttaagctatcaaaactcttcccctttctcccagtctggtctccaccaaataagctgaatgatataaaggtggtccctgaattct

SEQ ID NO: 707 - DNA, 2186 bp, Homo Sapiens
cactatcatggagggaggatgggtttgtagagtgtcttaggatcaaagcctgacactatgtgtcattgtgtgtcactgagcccctcaatatatccactggggtttgatcgaaaaggaagagccactatgagtgatatagaatgaagacatttgggggaattagaccttacacaattgtgggagctgattcaacagtctgcccaatgcagctgttgccatgtccagtgttggtcctaagtcagtagagccagcagttggaaaggagagatgagtgtgaagagggggagagtaagactagattagaacccatgaagacaaactgggaccctggaggacaaactggaactcacatttgtctcactctctttcagtgatgcaagtgacctgcaggattcactggtgccccacagagctgcacaagctggcccaggatttggagaagcagaagattcgacaacttggaggtccttgggctaaatggaggagaagggtatacagagctgagagccaaggaagccgatgaggaattgcacttgggtgtggagaacaaaactacgtggccattgattgactcaggagctctgctggaggtgcccttggctccctgcatcttaatcctggcctgagaatggtcagtctacttgagggccagtaatacgatcttaaaccttcatgacttacgcctcagagacctagtgccgcacttgacccacaagaggactcttgaacaccagctgtaacatccaccccttttgcttctgttgcctcttctgggagccctgacgggaaaacccagtgaggttgaggatacaggggtttgtgggagacctccgtctctggaacgaatcccccactcctccatcatgcccaccacactggctgcttgatttctctgccacactctagcttttctctctgaaaaacaacttgccagtaacacagcaagaaggctcagggctctgaactattgtgtgcatcccaggtggactcagtccccagatggaagaaggacaagtctccatctcagagacagggagtgggaaggtaactggaattttacctgtgcaaagtgccctacatccaggtgatatttcatcctgctctgttccttcgtaaaggtctccagcgagcagaagggttccatgagccttactcctctggtcccaggccttgccaggcacatgttgcttttccctgggagtagggctgggcactcctgcctccccatgcccatcagccatggggttccctttaaaggctctggattgagcacagtcacctctaatgggaccatggaggaccagcccagcaacctagagctgcttcccaggctgcctgggaatcatttcattttctatttgcagaatcacagatgttgacttttgatctcttcctctctcccttgggggcctcaaatcagtgatgacagctatttcatttctttttaattttttttcttttccctataaagagaaaaggtcagaaagggctcagaaaggttttgaaaatattggaagagctacatactggctactggaatgcaaaagaaaagctctagccctctctatggaaagctcatggcaatgaccaggcagaggctggggtgggcactctttaaggcagtaatgttaacctttagtgtgtctgtaaatcattcaggagtcttgttattaatacaatgcaaattcagattcaataggtctaatgcactcccaggcaaggtccatgctgccagcccagaaccatgcttagaggaacaggtgctgagtttcttcctcacctccaccttgccccagtcctgaatcctgcaatctgtaaatgctccctgctatcttcatgcagttgagtcttaacaggcaagaagccagccaagcgagaatctctcagcagacactttaatcaaattaaaacccacatttagatttttatcacttttgatcatttaaacagaagaactttcagatatatatagatttccaaagaagggatcacaagaggacactcaggtgaggggtggggagttggtggcagtgttgggggggctttcttctctcaccccattctatcccctttgacttattcatttcttttaaatagcatttggctcaactattatgatcttatgctgaaccttttgccatcccatgaatgggcaagcctctgtatacccagtgaaaattaccttt

SEQ ID NO: 708 - DNA, 1963 bp, Homo Sapiens
cttattaaaaatagaatattgcctacatcacataaagggcaaactccgccctcacttggtcacagaagcaattacagcattgtctgtagtacacagcccacggcctctaaccacagtgatgggcacacttggtgatgtgcaactcagtggggcctacagggtcccagctgacatagacatcacaaaggaatttgaaccaggactcagaaatagggtctctgggtgctttaaaaaagctgtttaagagaaaaagcagaaagactgtagtgattgtcaagtgcaaggagttctgcattccagacaaacaaatgcagtgtgcagacaacagacagagcggcaagggaaccccctcagcacaaggggacggcggcagataggcaaaaaggtaattactacatgtctgcctttcatgaaaggcagccaccctccttggtgtggcttggaacttcaattctggctaccaggatacagaggtggaggaagagaaggctgaacaccacccccgtctcccaacacacaccctcgaggcaagaaagatatcaagttctcattttgttgcaagaaaactacattctccttttgataataagcaaaaaaatacttctacatttttcaaatagtacctggtcggaactgttccaaacccagagaaaaaagcaataaacactgaaatcccctggcggtctctgagttgaagatgtaggcaggaagtattccatatcttcaaggtttttagggagaagcaagaaaacggtagaggaagggtagaggaggcctcccaggaggcctgggagtgaagtgtacccatcctatgaaagctggaacctttaggaaacagaatcaggagaatgctgactttaaatttaaattaccttgctgaaaaggattggcccaacacaggacaagcagcagtctttggaatgaatgcatcttttactgacctatgcctctctttcagaggtcacggctgtcttcaccctcttctttgcatgtatctcaagcctatgtaattaacaccaatatttttactcacatctgagaaaggagaccaagggcatcaaaagacatggcagtgctgggacttggcttcagaaatgcactttgctcaaggaaattctctgagccgccagtacaaacagttagagacggtgatgcacttcaaaagttatagcagaaaatagagatgagccagtaagataactgcataattgcaccctataggagaagatccttaaggggaaaatgatggacccccatagatacagaacagctaaggcatcatgctgcaagacatcccagcaatgaaaactgaagaagagaatggcactagcctgcaatggtcaagaagggaaggaagtgttcacccaagcgtgaggctgaggagttggagcacagaaggtgacactgattatgaagatttcccaacaaagagctggctacagtgaaaagagccctagttttcaactttcattttatctcacctacattgtctatgctgacccacacatcaagcttcagaagtagatcctggatgcctattttttaggaaaataagttcaaagttacagcttacgcaagtgcagttcttcaatgtccatgctctttgcactaccctgggcttacaccaggaattcagataagcatggactgtctgcttatgtgcagggatgtactggtctcaagtcagttaccatctgaaagctaaaaaaagggagtcaaaaggaccacaaagatgaagccacttctgacaccaaaggaaatgtgtcttctgctcacctttgtaggggccaggaaagaaaatgtaccccaagtacagatccataatttggggccagagtctcatttgacccctgtgagattcttcatgatccactctaaagctttaagccaccaaattcgatgtatttataagggagtcaaaccacatcacatgtgcaagttcaaagaatctgatgttcgaatc

SEQ ID NO: 709 - DNA, 1251 bp, Homo Sapiens
cacaaagctaagttttgaatactctgtgtcactgcttccagctgatattataaaaggcagtggtgaggatttcagctaaaaaaagattcgttgtttcaaaagcccagcctgaagtaagacagtgccatagacacgaccacaccagagggcaggtggttcacaaagggccttgcattcttctttgctcttgtttactttacatgagggcaaggagtctcagaagcgtaagatataatactacactagacaggcaagcagacctaatgtgcaaagtctcatgttggctatataggtagtttatatgtcagttccaattatgaatacattcctcagcaactagagttttctcattcattcttactgaactgttagggcatgtggcagcccagagctctgtcaaaatgaattgtcccccttgaaaagttggcaatgcaaggaagtgacaacctaatgcatgttagcactcttgataacaggacccagaggagacggcgaagcaacaattggatatgtgtctgggcactggctgttgttcctgcctgggttcaaatctcctctctgccgcttatgatctgtgtgcatttacaagtttgttagcccccttacctctttgttccttataaggttgtcgtgcaaattacatgaaatgatgttacaggtgtaagccaatgcctgacacacatatgtattctacagtaatcattatcaaagtggtaagcaggaaccagtgccatttcacaactatcaggtactcttctgggtactcatcatgaaagactgcagtgttccatttacaggcattggttggtggtttactaaagagtgtgtttttgtccaagaagttcactcactacattttgctcaaccagtcctctcatttgcagcgatttttttttctttgagcgtcccttgttgtgcagcataaacatctgggctgcatggtcagacccatgaggcttctcttccatctggccacctgttatataattaagcctgattgcagatgcgattctcatttagctgtcagcagcagcctgggagactagcaactgaggtgaataaaggtagctcaccacatctacaagggtagaagggctgaagcgaagggttgaccagccaggacaacaaaggttattgcttatggcagtgtcagcctaagagctcaagttcaagatcagaagcatgagagggtaagacctctaggggagtctgcataggtccaggtgaaaccctgggtgtctcttgattgtc

SEQ ID NO: 710 - DNA, 4104 bp, Homo Sapiens
agaagcaataggagatatatctcttattacattaagtctcctattgcttctgtttctctggagaactctaatacataaaagattatgattagaattatgcttgaagaaggttaatcttataatggcatgcagagcggagctgggcaaggccagaggctaaatatggagccagaaagatactgcagaaagtgagcaaaaaggatgagtggatggcctggggtggaatccgtgaaaaagggcagattgtcagtctcaggaaatcaacaggactgagttctaacttcagctgggctactatgccctggggaaaaatgcaatagacaaaggagaaacagccagagaccttgaccaacagaactatattaaaccagtaaaacaaaaagtattccatgtgtgctccagtaagaaagaagaaaggaaggctcaacatttctatcatgaggacttcttccagcagagaggctccacaggagacctttcattgaccttcactgagaaataccgaatatgtcatgactttcttcaactccacctcttcagtccatgctatcagttgaggtttatgagagctgagctatcatttctaaagacagaggaatttgttccaaaaatatctggctttccacccccaccttcatttataaaacaaaccatctaagtctttcaggctatttttccaccagcttgtttataatgtggtaatgattatgctaataccagttgggaatacattctatgtggacatgttgtgggaatgtgattggagtgtgtgggggagaggagagggctgtataagtgcatgaggagagctattctataaaattatagtacatgccctctttccatatttactagtttttgtaagctccttctcaaatgggaaatagaccatgcttcctttccagaaggatagttattgaataacgaacaccatgtgttctgctatgtcttatttgtctgagcactctgcagctattttctaaaccaaattaataacagtatactaaactgatttccctagtgaaaactgctggctactaccaatgtcagtatgtacaccccactgctccccaaagcttaggtaatcactgcataaccaaagtctacaacagccccagagtgggggcaaggcagctttcatggtacacaagggaaaattgacagcctctaattaaatgagactgtttacacaagcgatagagtattacaacactttccctacaaaaagaagagaatgtgaaatttcagaaaagacagatttaatgtggaacttgtcaccaccgtcagcttcggcatgataaaatgcacatggaaagtcccttgcagcaagcccgctgcaaagaagattcttccttcgtctgggtcagagggtgtggatgtctctaaagaaaatgctacctctcctttgctcacacacccacttgcggcacagtgagctttccacagcatatatgggatctgtgggctgaatgctggagacacaggggccagagcctggcagtgaagactcctgggttatggaggaaaaaggaagtatctcctttctacaaattaagaaaatgcacatccacatgacagcttaacacaggacaccgggtgtgtacagaaactgccctaaaaaaaaaaaaaaaaacctcccaccttcacccaagccaagaatcagaagattctccctaacattggagtccaaagaagaggagccaccatctccttaactacaaaacaactgagagaagaaatgtctccctttagtgccagtgaagagttttgcttctctagaacaactgtttatttttgatcttatgaaacgcgtgacacttgtaactgatttgccttctttttgcttgctgctagaaatctcagaaccaaattcgaggtcatttctgaatgtgctggactacacagcatgaattctgtgtcctctcacctcattcatagatacatttttttattcctacccatcttttcctttccccagattttcctattgctcttttatcatcttgagtaaagaaggttaaactatgaataaaaagtacaatctcaatgacgagtcagggaaaagtaagttttggacttccatttagagccatttataggtcagcaatcttttgtctctgtgtcttctttctgccctgaacaaccaaggcatcctagtcagtctctcttcatctgcataccactttaaagagcccaggggtcttccaagtacagtcactactaagaaaatgtcttcagtaaattttttttttttttttttgagatggagtctcgctctgtcgcccaggctggaatgtagtggcacgatctcagctcactgcaagctctgcctcccgggttcacgccatcctcctgcctcagcctcccaagtagctgagactacaggcacctgccaccatgcccggctaattttttttgtatttttagtagagacggggtttcactgtattagccaggatggtcttaatctcctgacctcatgatccgcccgcctcggcctcccaaagtgctgggattacaggcgtgagcccccgcgcccagccttcagtaaaattttaatgcatgttgcttatcattctttgtattgtaagcaccaatccttaatctgtgctgtggtttttgttcagaaacatttctttaaaaaaatttccccagacgctcagccttcatattctaatctttattattctgaactacctacaaagctaaatataccttgtctacatgcagtgcttatgtaacaatggtgcttattttgttttacattgcttcaacctctgaccagaaacttagaggacagaatgccctgcttttacaaaaaatgtggtgaccacaacggtaaccttatctaattgagaccattttaggaaggaggggaggagatatttttactgcaaagactgagtcataagccttcattttttaccctgggttgtgcagaaactttaaactttctatattatttcatttcttccataccaggacatttatttcctattcagtgacaatcttgatgtcttcatccttcaaactgctctctaacatagtttcaaaatccaagcattaaacattattaatgctcaggggatgaatatgttcattacctttactgtagtgatgatttcctatggcaaaatgttaaatgatgtaaagataaaaataattatcatagttattaatcatagcaataaaactggactacctaaagcacagtttatggtataatatttatgaattaagagcaacacaaataataatgttaattgctcacctacagatgaatgcaaatgaggatataacagagtcgaaataaactaagcaaaggaaacaatgtttcatagctatcgtgttcattattctaaccaaaaaaaagaacacagaaatcagatatatgcaatagggtacactgaaatgattctcaatgattatataaaacatatatacattattttctcaacttcctgaaacatcaattctcttgctcataatgtagttaaatcgtctaagattagcctcatgtgaccatgtttggacttcttaaaaaaatcgcttcaggaacattacattttcatgatcagatagtttcctgaaagtattaaacaaaactaggaaaagtgtttaatagttatttggattacatttcattaaaaatctttacgatctctgttaacagtccagtacatttgaatgttaaggaggaccctgcactgaaggttttataatgctttatctattccaagttatacaacacaaaaattttctcaaacaagcacatgtgactttgcctacatctgcatttaagattctaatgtacatttttttattcttttgtttaaattattaactatcaacactagaattgagcatggtatgtattcagaattatgttcaagtaattagtggctattttgttaataaagatgaagcttcaattgtagatttgataattttaccctaaaatttttaaatatataaaaaatagcattttttaaaactataatggtaaggcaaaatgttctcatcagattcggtgggcagatgggacagggaacacagctttcctgaacctggaactcacagttctgccacgcagctatagcaaaa

SEQ ID NO: 711 - DNA, 1165 bp, Homo Sapiens
gagccaagatcgcgccactgccttccagcctgggcgacagagcgaaactccgtctcaaaaacaaacaaaaaccccaaaacacaaaaagacataaaaactatttggataactctagcatttacccaagatgttaaggaatctaaaagggagttcttaaagacaatagatgagacaaagccatttccagtgtcggcccatttaataaactggttccacctggattttctcttcattgtggtgaaagccaccacctaacaatgctggccctgcctgcatcatcgcatgtcatcatgacaacctatgggggagaacagctccattcaacagatgcagaaactgcaggttaaagggtgaaaagcagttgcgaagtccccacagcttggaaatggtggagccgagactgaaacccaggtgtgctagcatctaaagttcatgctctttccaccacattagactgtattctgagggcaccaaggaagctccatttttcttaagaaaccaaattgcagtcctccaggaccacagccaggggagcatcttcgtgggagagtggctgctgctcagagttgtgactcccatccttaagagtcctctgtcctctctggcctcctttctactgatcattgctgtccccttcacaggggagaggggccatggcctatcccctaaagagtctgccaaggtagactcataacctccccgtggcacagctcagacaagctgggctatttacataagacttgacccagggcttgaggacagcgcgaggaatgaggtgcagaggagactgctgcttctgggtgacagtctgcctggctgaccacagctggggtactcattggcctcttgaggccccccacaggcctgccctgcctgacctactcttgtgaggccaaggccatctcctccactctctgggggcctcttctgactcctccaaactcttccatgtctggactcctggcttctgcccaaggccatctattggagtttgggtttccagttgaggatctgcctttttcctggatgaccaaacctagaatgtgaccggcctcatgctccctcctcacaagggtgtggctttatccgagggcctcagcaaggcaaccaacaccagacatgaagctggtctctctgtgcctgctttactgcccttcgctttcct

SEQ ID NO: 712 - DNA, 1761 bp, Homo Sapiens
tctgtataaaaattgtattaaatgctaatatacaaaatgaagaccttagtatagttacatagcagatttctacactgagaaagcaaagttcagccttgtgtctccccagcataatctttagtagcccttcacagactgtaaagacggcctttctcttttgctctgttgatacttctcttatttgggtaaatgatctaggggaagagaaggagcagttttatagctattgtagctcctgggtgttttgaatcacttcctacttttgatctgttacttctgttcacttccagtctagaattcccttagtaggttggataagttaagggccttatgacatggtaaactggttcgtatgtgtcaaggtctgtgtgtacagtcattttggggaaagaattatgccgaagcacaataacacatttcttagctggaatgctgagaagctagggaattctgattaactggttagtcacgattcagctagactcttttagtttcatctccattgttgaaaaatttatctaaaatataccagtctattttcttttctttttctttttctttttctttttttttttttttttgagacagggtctcactctgttgctcagactggagtgcagcggcttcatcatggctcactgcagtcttgacctcccaggactcaggtgatcctcccacctcagcctcccatgtagcaaggactgcaggtgcgcacttccatgcctagccaattttttatattttttgtagagacagggtttcaccatgttgcccaggctggtttcaaactcctgagctcaagtgatctgctcatgttggcctcccaaagtgctgggattataggcgtgatgaaactctttttttatgtgttaaagatattagctctttcttaatgatgaaggcttttgcagagttttatttattatgtttttttttttgagacagagtctccctttgttgcccaagctggagtgcagtggggcgatcttggctcactgcaacctctgcctcctgggttcaagcgattctcttgcctcagcctcccgagtaactgagattacaggtgggtgccaccacgcccagctaattttttgtatttttagtagagagggggttttgtcatgttggccaggctggtcttgaactcctgacctcaagtgatccgcccgccttggcctcccaaagtgctgggattataggcgtgagccaccgcaccctgccttgcagggttttagtcgtgattttttttttttttttctggttgttgtcttttttttagcgacacggtcttgctcttttgcctagcttggagtgcagtggcatgatcatagctcactgtaaccttgaactcctgggctgaagcagtcctctcacctcagcctcccaagtagttaggactacaggtgtgtgccactgctcctggctaattaaaaaatatatatatattttgtagaaaggtggtcttactatgttgcccaggctggtcttgaactcctggggtcaagtgatcctctgccttggcttttcaaagcgctgagattacaaacgtgagccactgcacctagccctttaaaaaaaaaaatgttgttactagatagaattataattctaggtgtcatgttaccgtcaggcttttccctaatacagagatttttgggggcactgagggtgaagggaattgtttttgttttataagcctaataaatggtaggcttttggctatttttgtgcgtgaatgtatatacacacaccaaaagaagc

SEQ ID NO: 713 - DNA, 2148 bp, Homo Sapiens
aaagaggagcctgctggtctgctggcgggcaggcggcgctgggccggagcctctccctccggtgcgcacagcgcaccctctcctcccccggccgcccgtcgcagcgcggagagggcgtgtcggcaccctgcctggcgagcgcccacccctacaatggctgcgagcgcgcgggacggagggtgcaccgccgctccccggggacttgcacgggtggcgcgcctagcccagagcccgcttgtagtgagcgctcagtagggcgggaaagctgctgccgctactgcggccttctgagaagacgcccattctctgatgtcaggactgcatcgccgagtcctgattgcaaatagcgaaatatataattaaggagagttcgggggcgtatcctgcaatgggatgccgagttcgataaagttgcaggatgctgggaaagtggattgatttgctgttgctaaatgaatggaaacagcgttagagcttctgtccacgatccatcagtctatcgagattgctgattgcctatgacttggacggttgatggttttcaggcccactgagagcagccagcgttggtataaccgcagggagccctcctgggaggttgaacctgcagagcgcaaatgtgcccaggttgatttggggcctagtggtccattttcacagctccactgcctatctgcataaccaggagccctcattcagatgaacgccaaatgggccagagggaggagaatcaaatgagcaacttttaaaagatattaagacataggcacctaactccggacagttcctttaacccttgagctaaccatttgaagcacaaaacataacaaaagaaaagactggggggagtggggccaaaagaaaccaagtgcaaaattctgtacacttgtgtcagattcactccgtaatgggaaaaggtctggctttgaaaactttatggatcaaagggatgcatggagttacacagcacagctgcagaagataatgttcccctggatcactctgcccaactcttaactgcaacccaccttccccatccgtctccccgaaatcacccggaagggtgttaccttcaggaagtaactgatctcttgatcacccctgctggatcctgtccccaagggcgttcgaatgcatccgactcatcttcaccttgccaataacgggtgcttgacacatcgtttgctgccaatcattattgtgattttaatactattggtattctaactatcaagatgactgcttgtagagccagattgcctggattcaaactccagttcacaacctactaactgtatgcctttaggtaaactcagatgcctctgatggattcgaaataaccagatatatttctgaattgcttcatatgatgaagaaactgaggcacagaaggtgggtcaggagggaggaagcaaaagagctagaattcaaacatagcagcatgacttcgagcccactgtcttaaccacttcagataactgcctctaatgcaaagacccctctcgaaggtcagaagtttcacaaacactgccttaagtctcatggctaactgggaggccccacagagcaacgtggctgtgcattagactcacctgaggagcttttaaaacatacctaagcttggctaggcacggtggctcacatgtataatccaagcactttgggaagctgaggtgggaggatcacctgagcctaggagctcaagaccagcctgggcaacatagtgggaccgcatctgtacaaaaaattagacagctgtgatggcatgtgcctacagtcccagctactcaggaggctgaggtgagaggatcgcttgagtgcaggatgtcaagtctgcagtgagatgtgttcacaccattgcattccagcctggatgacagaacgagaacttgtctcaattaaaaaacaaaacaaaacaaacaaaaaaaaaacaaaacccaagcttgaagcaaataccataatggggtaacatttgggaaatctaatgaaggggaaatgagatatctttgtactattcttgcaacatttctataagtctgaaattatgtcaaaataaaaaattaaaagaaaaaagaatgaattagaataatattcattgacctggagggatttctgcagaaattattgtcttcatagtaagatccagaa

SEQ ID NO: 714 - DNA, 2337 bp, Homo Sapiens
agtttcccagcgcaccacgccggattccgggcgtcggcgtacaggatcccagagaaggcttcccgccggagcagcggtcgcgggcggttcacctggctgcgcaggggtcccagatattcagagaagagctgaggctcagcctgtcctgccctctggattaattgccctggttgatcacgtttccttgggttctggatctgctcctccagcccccatattttggaaacaagtgtcatttagaatagggggtgggaggccgggcacagtggctcacgcctgtaatcccagcactttgagaggccgaggcggacggatcatgagatcaggagttcgagaccagcctgaccaacatggtgaaacccactctctactaaaaatacaaaaattagccggacgtggtggcgcgcgcctccatctcaaaaaaaaaaaaaattgggggatggggaggtgtgggttgcgggaggtgtgggttgcagttgtgttttcaaagcaatgtttactatctggccgggcgcagtggctcatgcctgtaatcccagtactttgggagaccgggtggatcatgaggtcaggagttccagaccagcctaaccaacatggtgaaaccgcgtctctactaaaaatacaaaaactagccggctgtggtggcacgcgcctgtaatcccagctactcaggaggctgaggcaggagaatcgcttgaacccgggaggcggaggttgcagtgagaccggatcgctctccactgggcgacagatttgaatctacgctgtgcccatcttgcagatgaagatttccccaagccgttacagatggttccctacccattccagagctgctaattataaccaccagcttcaggcggtaggctgagacctttattgttttgtgtcatttagtcatcagtaaaccccatggaataaagcaaagtatgtctgctctacaaatgagaaaattgaggcccagagagactgcccaaggtccctcacagtaaaagaatgtctgaggattcaaacccatatcattttgatgccacaaagccagtgtgcccttgaccctccatcgcccaggaccttaaaatttcctgacagtgactggcattctccctgcgggttgtgaacaggaaactgcatttcagggatggacggtggcgggagcagtcgctctcgggagcctctccttcccctggctgtgggaccctagaggctggtgtccgctgagctggaaactggacttctgcccagatctttgaacgaccccacggtccagcggcagctgtggctggggtctatcccagagtccattgcccctctctgggttaaaaggatagcccacctggttgcagagattgaaaggactaattgtgaaaatgcttttcaaaggagaaagtgtaatatgcaaataccaaatattacactatatttcaaggactcattttaatactttatactctgttaactaaatgcattataatattccttccattgttggaggaaaaatctggttgctcattgtctttcatttcatgtcttcaaaactagtatcttaatcagtaatgctttccttcataatagattgtgttcatatgtattctctcttcccttcaaatttcctatctactcactttgaaaggaaatttctgaaattcatttctatgcatttccctcctcactttttttctgcacaaagttcaaaactatattataggtgaaaaaataaaaccaagaaatgaagggaaggttgaactatgaaatcaacatagcattgtgatctcccaacgctgatatacccagagtgaacaatttgccttgctacagaaaattagtcacagacttgttgcagctgaagtgagcaggatcatgaagttccttttgtttgttgaatatgttattaagtcttcctcggttttaataatgttgaactgtttttttattactcctattatgttttgctgggcatttgtttaaagataatacatcagttttgtaaccttgtagcaatataagttattgatgataaatactccccttctttctttctgcaggaataatattttcactgcagctttggggtcatgcctaaaagtggcttgaaccaaattgaaatagcaatttgaaaaaaccccagatcaatctaaaatgttatttttttaaccaaagcatgttcaagatttgaaaatgtatcctctattttcaaaagtatacatataatttatcctagaacttaatattactgaacatagataacctcagaccacccaaatattctccaaagcaaatcttaatcatacctttaattaatttaatcgcaatttctgattcactttttttttttttttt

SEQ ID NO: 715 - DNA, 3877 bp, Homo Sapiens
aagttgcaaaaacagcacagtagtttccaatatatacccctcacccagcttccacaaaaccacgggccgatgattaaaacctggaaattaacaatgatcctgtcctattaatagactgcactaaaatctcaccagttgctccactcgtgttttttccttgtctagatcttactcacatttaggtgtcatgtcttgtttgtcttccccagtctgggatggtccccagtctttttctgtctgtcattactgtgatgctttggaagaactcaggccagtggctttgtggcacatctctccttttgggtttccctgatggtttctcaggattagttggaggttctgcattcttggcaggacccccatggagtgatgctgtgtcctgagtatttcatcatgtggatgtgtcctcatacaggtgacattaactctgatcgcttggttaaggtgctgtctgccaggtttctgcactggaaaggtactatttttttttttttttttggtcaaaggagcagggtataaaaggcagggcatgaaatctgagagcaggcatgcatcaggaattaggaaccaggaactgggagctgaggctgctgctctctgaggaaaaggagactttcaagaagatttaaaaagaatggagaaagaagattcaagaagatgaagatgtcaaatgcctcattgcaaaatatagattggaaagtgttcctttaatttggcattttgtgggtcatttgtgattttggtaaattatgcaatgtgaaaaaatagacagtttctttcaaatggcaagcaattaaagaaaaaaaagtcataagtgtgggctgtagcaacagtgaggctcttattgttgtcattgtctgacagaaatctgaactctgatcccacaaatttctctgctcccttttccctgctcactttgaactgaagaacctctttactccttccttcctttccctccctcttatctccttgcctccctgtagattccatcacagcttcctccatccttttttttcaattatactttaagttctagggtacatgtgcacaacttgcaggtttgttacatatgtatacatgtgccatgttggtgtgctgcacccattaactcgtcatttacattaggtatatctcctaatgctatccctccctccaccgcacaacaggccccagtgtttgatgttccccttcctgtgtccatgtgttctcattgttcaggattacaggcgtgagccaccgcgcccggcccctgactttttaatgatcgccattctaactggcatgagatggtatctcattggggaacatcttaaaagaaaagcatataattgccatttgcacttcctcacctctttatccactcttcagcctactgcaaattgacttttgacctctttaatctactgaaatggctcatgcaaagagactttttataaaaatcacatataatttagattttttattttctgcataaatctctttaattttatgtgataatacagtgcatgattatttgttgagccgttaattttgtattagccaaagagaaagttgaacctgtcagttaaactgggtggaataagaaataatattttaaaattagcagtaaatagaaacttgcacaataaaaatatttttgtgtcacttgaaatattaccattggttgcaagttttaaagatgtaaaaggtgtcttctttcacgttcactttttttttcagtagagatactgactgcaggcagcttgcctcttttgtttttttggcttatagtcacagtatttgagcacaaatttaatgaagcattgtttaattgagacttccctgtagtgacacaacaatattgcaaatttttttcataggcatttcctcacttaattctcaaacaagttttgtcttttttttttcatcacgatatctgtagacaggatcaaacaacttttgaagggtatttgatttccccctatttacagatttaagaaactgaaactcaaaagagacaaattgccacattcatcctgccacagggtgtgtgtgtgtgtgtgtgtgtgtgtgtgtgtgtgtgtgtgtgtgtgtgtgttttctgactctaaacgtagagcagtttctactatgccccagccacttggatgtagtatgtgtacaaaagtgacaacacgatatagtgattcttcaaagtaggtttattgttctaattgacatttttcttcaaacattataggattatacatttccaacaattttaagcaattttgatgcttatcaaaatgttgtatatttaataagtttttgcattaaatgagtttaggttggcaataaggaaccaccatatactttaatagatactatttcataccacagttgtgttgtctttaatacagagatgagtgtttaatactcttttgcaatgggaagaagttaaaggagtttgagttaaaatagtgagagaaataattgaatatgattgttaccttaaatatagccacagtctgttgatttaagcttcagttagtcctaacatattcaacatattcataacaaaattttttgggcatctctggctcatttattaatacctatgaacctgcaaaacactgctgtatttgtaagactgatatgtatgggataatgtatgcgataagcaaaaatcttagttttctagctagcttttgaaatgaaagtaatggaaacatgactactcagatttaaaaaaaccaggctttacctttcgtagttcaatttatattagtacaaattcttctcaaaggtggtctccttgagaaggtgcacaggctactggaaatagtgaagacagtaataagaagaagattaactggcttacttaccaagaaaatgaattcaggaaatttgattctcgtagagatctagaacaagcaaacaggatgaacaaccacttattttggaatagtgtatttaaatttgagaaagagtgatcttttctttctccgaagggttaagaatgtgatcaaaagcctggagctgaaagaaggataatatgtatgggagacagtgaggacacttgcctgaccagagcaggtgaacacctatgtacaataaagctagattgtagtggctgcagtgggtgttgaaatacatgttgaatgcaacaaagaggtattaaaatttcttgaatgttaatagattggcctaatcctgggttttaggcagagcatcctacaaccttaacaaatggtgaatttggaagcaactagactcagggagatcagctatactgttttgtagaattttgaatttcataagccaataaagctcctagaaaattcttaaggactaacatatggttatcaattatttatcttgaaggaaagaatattttaaaaaccccaacaacaaaatataaacagtaaattaccacatactatcttcactgtttcatacaggaatgaaattttaacatcaaatcagcaggaaggacatactcccagagtaaaggacacaacactaagatgaataaacttgatgttcttagagacctaccacattgcctctgttttctcactttctcctctacctgtaactctgtgatatagctgcacagatactcagaatgatagctgagatccactgagctaagagaataccgtaattactcaggcataacataatgaaaacctgggaaagaagaagaaagaataagagaaggaagggagaggatggaagaatgatagcccatggcaacagattgaatatagaaagtaaaagaagaaagtgaaagctacctgcaaaaattatactatgatctcatgtcgttttttgtttgtttgttttgttttgttttgttttttgagacggagtctcgctctgtctctcaggctggagtgcagtggcgtaatctcgg

SEQ ID NO: 716 - DNA, 2233 bp, Homo Sapiens
aatttcagggccgttgtcgcctccgggcggtccgcgggtcccgagcggactgggactctggagacgtgcccccaaccccaccgccattcaccctgtcattgcaggggagagaacagaataaagacgggtacattttccatctcacctctgaacctcggttaggaaaacgctgtagccctgactagtgggctcaagggccgactggaaaagggcgagtcagcgttcaaagccgattcggggcagccctctctaacgcagagggccgaggataagaagacgacaatgtgttaggggccctccgggctaggactgtcctcaccactttgtacattgccaaagtaaatataacgtagaggtcaagcgcaggcgctttgtgggcagacatgactgagctccactcgcgactcctctaatggcgtgccagctgcggacctcattagccccgcctcaatcattcagtatgttttggttgtctacagtgtacgaagccctgttctcacaattagataaaatgagtgtgaagtgctcaacataattcctagtgtagtaggccttcaaagaactattatcattattaattactcatatagaatacaactttatgaaatgataggatcccattttaagatgaggaaaatgaggctatcagagacgttaaggaacttaatgtcacacagttaataaacgatagaggtgcgatttgaacacaggttgtctaataccagacctgcatttataactgctgcttcccaagttatagatatttcagcattttatgtagtcacaattgaagaccaaatatttagttacagactaagttggcatgttattactgaataagatgctaaggtatctactaaagattttaagtgcaaaaggcattagagaagaatttactgtggattttttgcaggttctgattgtaattgtatcaccttgagaaaggaggaaatgaaagcagattatcaggcatacttttttaactctaagcaactttttgcattactttctaaggaccatcagcaacaaaaatcaatggtttctaatgttgatatattttcctctaccaaaaaaattaaagcagctgagccaacaaaaattctctgttttggatgtgttagcatgaggaaatggcgaataggaaatgagcttttgcttctcatgtaggaaccctgaaggagtcagatttgggaggggttgaagtctgcttccaacagaagcaggggtggagaagggaaaggaaagacttctggtgtcctaaatgctagtcccaaagtggggatgctgtttgtccggataacccttgtaaatctgctccattctgcagctactcctgggaaacttaactcagccaaataatgcaaacaattgcatccatcatcagccacatcagccttaggagatacatccatatcatgagaaaacactacctgaaattggggaccactggaggattaaagaacaaggagatggctggctatttaagaaggaaaggcagaggctgcagaaattgagcctaacggcttatcagatgggatggataattctttaagtttaaaagaactactcattttccccaacatctgtctttgccatcttcctatctaaggaacctttcactttttagctggggacatagctttctggtatgagaactacactgctcaaacttccaatcagcttgtatgcacttggtgaatcttacctaccacaaacagaagtctggaaagtgaaaatttatttccttttcaccatgaccagccttgttcagaacatctgagaggcacagacctgagaaagaatccccaggctgaagaggtagaagttggcagaagttaaaagcaatgtctccacaatggagaagtgacatgctaaaggaacctggcatctagacatttcctaacccccaatccctccttacatatgacctgctcttagaggagtacagcgtggtggttaggagtgtggactcggcagccagaaatcctgggatctgttgcttgttagctgtgggccttaagctaagaacttaacctctctgtgcctcagttgctccatctgttcaaatgaagataatgataatgaagatgatatcacctgctgtgtaggattgttatgaaaaatcaagaattaatatttgtaaatcacttacagggtctggcacataataagtgctgtgtgggtgtttgttaaataaaataatatacaatgacataggcattgtggttgttct

SEQ ID NO: 717 - DNA, 2172 bp, Homo Sapiens
caataaccccagcattggagagagtggagcagcccttcaagaagttccaacctctgcccaggactggttttaccaacttcactaggcttagaatcgtaggaagtctatttgggacttgcgagtctcacgtattcctgcctaaatgtttatggatacctgtttagagctgaaatcttttcagctcccataatatgagggaattaggtctcaaagaagatcatgtattttgatcagaccttatagctgagcagtggaaagaaaaaaaatcagtgtgagatctcccagggttccgcaggagtggcttccttagtccaactggcagcctatcctggaatattgcctgggagagaggttagttgcttttcctggtgctaggaactgaatggttttacatattgatcaatgaaaatacttatttggcctacaataggtgcaaaaatactgctaattactaacagtatctcttctttgctgcgtgccagacactccactgggcattatgcagttaatatgtaccatgaatttcccgtggttagcaatgatgtcaggcatagaaaagacatgaaattatgatgtcaaatgaataaactggaaaaaggaatttcttgaattttctccagctgtcctaagaatgtatctatactttgatcctggcctaccttttcaacatctaaactttattcccccaagcttctagatattcaaagttaagtattaaataaaatcagtaaatatatacaagcttgtttggccattctgaataaggttatatttccaccacacaatctccaaattctctagcagaagggatcagtatgttatagataccccctttccttccctccctggcaagccaccacatctgttatgggtactcaatgcagtggctgcacctgggcctcactcattaagcagttgttgattgagtgactgaattgaatgcctgatgagctcgcaagtaagattcagactgtgcctgcaaactaataggatccctccgctttttattcactactgctgaggtagatctcaggccagcctgaagtttaggtctactgagaaataataagcctcaaaaatcgagctttgcttcacccagtctcccagtaaacactaagaaatgttcacattatttacacatcctagactgcctgtcttatggaccaaatgtttgtgttctccccgcaatttatacattggaatcctaaccctcaatgtaatagcattaggtgctggggtctttgggaggtgattggctaatggacctggagccctcatgatgggatgagtccccttatcagaagagacctgagaaggcttgcttcctctccctgtgctcttcatgatgtgaagacacaagaagacagccatctgtgggccaggaagaggtcctcactggaacccaaccatgctggcaccccaatcttgaatttctagcttcaagaacttgggaaataaatgtaagccagccagcttatggatttgttacagcagcctaagctaagtcagagtctctagaacagctggtctggggcagcggtgaagggaggtgggtgggcatatgaccctgccctgcacatgaatggcaaaggcaactggagagcctctcccttttggtgagatccccagtccacaagggcatgttcatccatagctttacttcccgaagcaaattctggttcctggggcctgtgcctccatagatggcatgatctgcagcctcctgtggtaatttaccctcttcctaaatttctgagtcttcacatttaagcaatcctagttagatatcctctacctgtatccatggctgtctttcagtcacattacagactcattgtgatgaccatgtagggacaatgtgatttcagaaacatggcctcatttgattttaatgtaaatataaatcagtgaagcagaaaaagagaatctccagaaaaacaagggatgaggctgtacagcaagttaaagtggaatcagaacccaactgtagtccattatttgtttcaatcctgctcttttctaccatatcacccagtttccaaatcgttcagcaaattgccatggtcaatgggattaacctttcccttttattctcaggaaatctcccttgtccattttgcaagactgtgtgattctttctactgttacaaggaataaaagccttcctaaaaa

SEQ ID NO: 718 - DNA, 1893 bp, Homo Sapiens
gcggggggcggggtgcggggagaggaaagcgccgcgggtggcacggtgcctctggcgacagagtagatggacccgaaagagacccgaggtgacttcgggctgggcaggacacccccgggagttgccagcggctctcagcgggcgcctctaggaccccttgtcactgcgagcagcgcctgctctggggaggggctcgaaggcgccgcgccttctcaacgcgccgctgcgtcccccaggggctccaacttggacagctagactggaaatactgctgcacaaagttaggctgagttcgaaggacaccagagaggaagcgcaaggagatgcccttctccggagccgggcagagcgccagaactcctagacgggaaactttcccccattgaagctagaaccggtcatgcgactcggctaagtgtggggaaacactggctctagactccagctataccacaggaaactctctaaaaagagcagtatgagtactatgagaaatgagccaattctaatcttccctacatgcagaaggcactgtcacagatggtgagcacacagccacataaggctatgacccttctctactcatcccctctttgtgtggttgtaccttgaggaatcagaagctcagctgctgagcacaaaacaagataatcaaagatggtggaagaagtcaattggatgtctcctccctaatggggtttccagatctgaagcagtgtcaagctgatagaagagacaagggaggatgatgttgacaacagatgttgaccatgtggatgtaacaggtcagcgctttgccctggaaagcacttgttaacagcagctcaagagagaatacccaatgaagcaattatgtgtggagatatctgaaggtgagggttcagtggatgcatgtgcaagtttgctacctgggtaaaccacatgacgctaagtttgagatatgaatgatcacgtcattcagatagtgagtatagtacccaacaggtagtttttcaatccttgccccaccccaacactcccttatctagtagccaccagtgtctattgttcccatctttatgtccatgtgtactcaatgtttagttcccatttataaatgagaacatgcattatttggttttctgttccttcattcatttgcttaggataatgtcctccagctgcatccatgttgctgcaaaagacgtgatttccttctttttcatggctgtgtagtattccatgctatatatgcaccacattttctttatccagtcccaatctgtattttaaataatccctgtgggaattctgatgcagatggttagcccctcatacttcagaaaatacagatcagaggcacatgaagtcagagaaatgtgtggctgtttttgacatgcatgctttgctcagatagcgcttggaaagaaggccacttacctggttttgttcactctacgggccaacaattggctgcatggtcaacatgtgatttaaaaattaagatacttccttaaaccactgctgaaggagtcagtgacttgaggtttcaaaaaacaacacaaaaactagttgaaaaggactcaacctggaatgtagaataaaatatttattatttactcaacagttaatgtaaacaaacatgtatacagcaaactcttaggagctgttaatttctcattcctcttcacagaatgactaaagaagctttagcgtagatgaggtgggggtaatgtttttgtcctcttattgcacgactcctcatttatttgacttggcttaatgggatctactgattcttatcttgcctcacaaatgtgaatgtcaattccggcatgtggtacactgtgctaattttaatatttttagactatttgtaattgttcataaagatcttcatcaattatacctcta

SEQ ID NO: 719 - DNA, 3790 bp, Homo Sapiens
atttgtggtctcctctcttggctttggagcccccctccctctgtctctgtacgggggtgccttcttcttttcttcttctcccttctttcttgcctattaaactctccacttcttaataccactacacgtgtatctgtgtcattttatccaatttgcatgagacaagagccctggtgcccctccactcatcagagccgtatcattttggtgcatgggccaggaaaatccaaagtacagccttcgttggagtgatagagtctcaccgttgcccaggctggagggcagttgtgccattttggtgcactgcagcctctgcctctggagttcaactgattctcctgcctcagcctcctgagtagctgggactagaggcacacgccaccatgcctggctaatttttgtatttttagtagagagtgggttacaccctgttggccaggctgctcttgaactcctggcctcaagtgatctgcccaccttggcctcccacagtgcgattacaggtgtgagccaccgtgcctgcccggcctttttaagagatgtggtcttgctgtgttgcctgggctggtctcaaagtcctgacctcaagtgatccacccatctcagcctcccacagtgctgggattacaggcatgagccactgcaccggaagtctaggtttaattattccccattactgagacaagatcttcctgagcactctaccccatgcctagcgaatgatcagtttttccagctggccagtgggaagaggtcctggccctacctcgtgtgaatcttgggcgttgtttcctcgaatcctttcagctggttctttccctggccttggagagtttcttcacacacatgtgctgattagttctttgctgaatcctctgaagtcctctggggtactctctctgtgcacctctgtcttgtaggtgttccattatctaagctctagctgctgtggtctcctcggactcagccactccatttcctcaactctgcgaatcctctgggctgcaacaacccacatcccccttgccctgccccacactttggaaacgctctcgaagcagtaaactgcacagtcctaaaaggactgttgatgtcctttctctctgggatttcattgcttttgttactttctctcattgcttgatgttcagcgttttgaacactgttgttccatgtattgggtctgtttttgtcactgtggtggtggtgattgtttcagacaggagggcggacccagcccacgtgactccatcttggctggaagcaggaatctcgggatcagtggtttcaaagctcctcaggtgattccaggggacgctgaggtgaggaccacttgcagagactcctctgcttgaaatatctctcaatcaaatggaatcttcttttgttgttcccaccccttcattttctctgttctctctttctgagttttttctttgtttttgttttttgagacaaggtcatgctgtgttgcccaggatggagtgcagtggtgccatcacggctcactgtagcctcaacctcccgggctcaaacaatcctcctgccccagcctcacgagcagctgggaccacaggcccataccatcacgtccagctatgttctctctttctggaacttctgttaaacaaatatggattgaattgattctccatctcttttctttcatattttcctttcttttctttcttttttgttggcattttgctctacatcctgagaggtgtttcaaaacttttccacccgtaccttcctttgattaattttttatttaacttaattaattaattaatttttgagacatggtctcactctgtcacccaggctggagtgcagtggtgcaatctcagctcactgcagactcaacctcctgggctcaagtgatcctcctacctcagcctcctgagtagctgggagtacagatgcactccaccatgcccggctaattattttattttttgtagagatggggttttgccatgtttcccaggctgtgatggatttttaaatttggtccgtcgtatttgtgacttccagaactttgtcttgttctccaattgcagcatcttcctggaagcctcttcttggttcgtggtgcattatcttattcattcctttcctccagggctagtgttctgctattcttcctttcttttttttttttgagacagagtcttgctctgttgcccaggctggagcacagtggcgtgatctcagctcactgcaagctccagctcctgggttcacgccattcttctgcctcagcctcccgagtagctgggactacaggtgcctgccactacgcccggctaatttttttgtattttcagtagacatggagtttcaccatgttagccaggatggtcttgatctcctgacctcatgatccacccgccttagccttccaaagtgctgggattacaggcatgagccattgcgcccaggctttttttttttttttttttttttttttgagatggagttttgctcttgttgcccaggctggagtgccacctgcagcccagtgatcttggctcactgcaacctctgcctcctaggttcacgcaattttcgtgcctcagcctcccgagtagctgggattacagtcatgtgccaccatgcccggctaattttatatttttactagagatggggtttcaccatgttggccaggctggtctcgaattccagacctcaggtgatccaccctcctcagcctcccagtaagccactgcacccaaccatctgctattcatcttaatcctctctggtggcaccgaaatgaagaggagacccatgtggatctccctgcagccgggtgagtctggttccacaggaggccttttcctgaactggctgcaggctccgcgggcaggtctgttaattggttaaaatgcttcattcagttaggtgggttttgttcccttctccccacccagaggacatttgggaatgtcgggagatatttttggttatggcagctagggggatccttctgacacctagtggatagaggccagaaatgccactaagtatcctaggacatgcaggagagcctctcaacgattaagaatcagctgtcccaacatgttaatagcacataggtcggagagacaccctgatttaaggccatctgagtacaggctccccagctctcaccaccaaaggccaagataaggagggtccctctacagccacttcagggaacttccaagggagcttgttcaattatgtttatttattttatttatttattttttttgagacggagtcttgctctgttgcccaggctggagtgcaacctccacctcccaggttcaaacgattctcctgcctcagcctcccaagtagctgggattacaggcacctgccaccacacccagataatttttgtattttttgtagagaaggggtttcatcacgttgcccaggctggtcttgaatgccatgaccgcccccagttgtgcttagaagataccgccaacaggccgggtgcggtggctcatgccttaatcccagtactttgggaggccgaggcagctggatcacgaggtcaggagttcgagcctggccaagatggtgaaaccccgtctctactaaaaataccaaaattggccaggcatggtagctcacgcctgtaatcccagcactttgggaggccaaggtgggtggatcatgaggtcaggagatcaagaccatcctagctaacacggtgaaaccccgtctcaaaaatacaaaaagttagccaagcgtggtggcacacacctgtggtcccagctactcagaaggc

SEQ ID NO: 720 - DNA, 9593 bp, Homo Sapiens
attcacagcgtatgacactgctgtcatcatgtctcctggattccttttttttttccctataacagctctatcaagctataattcacatgccttaaaattcaccttttttgaaatgtacaactgagtgatttgtaatatattcacagagttgtgcaatcttaacaactacttaattccagaacatttacatcacttcaaagaaaccccataccctatagcagtcactcccaattctcttcttccacccattccctggaaaccactaatctactttccgtctctttggatttaactactcaggacattttatagtcagcacgtaagccggactgtctaggaaaacctccccttcctgtgtctggaggtgttgaaaaaaataattcaacaatgctgcccctgctggccaccagtgtaccatgcaataattccatggcccctgccacagcccaggaaatggaggaaatggccaggcagccacattctctcatcctgcagaaggacccttctaggtgttagaggttgagggattttggctacatatggccccatacatcttcctagctatagattccaatggaagaagagaactttctttcctctactgagtgcatataaacttctgcatcttgcttctggcctcaacttgatcttcagcatcaacatcaagcagagcagcatgagatgcagtgcaatgaataaacagttcttggtcacgggcttgcccttgcagtctggaaagaaaatcctgcaactgagagagccaccatgatttcctgaagtatttggtgaagaaccattctccaaacgtgaagtcaggagatatgtattgctattatcagagctgaggaaaagacactagaagtttgaaatctcagatgtccacagcatcatgacacatagttaggattccatgctgaatagaagggggaacctactgaagagttttcagcagaagagagacccaataaaacttgcgtgtaaattataaccattgcttctgtatagcattctgattggagagtcaggtatagatgcacagagagcagttagaaggttattatagtagtctagaagtgactgtggacttgtagggaaatggcaaatatttagaaaacaaattcaataacactcagcaatcagttggacttggggtatgaggaagggagaaatgtctggtctgattccatcacaaggccttgtatatgctgttccctttgcctaaaaattcccttagctcctcttttaacctggcgaaatgttgctccttcatcaggtctcagcttgagcatctcttctccagggaaattgatcctcttgcctttcccctgtttaatttcccttcccatcacttatcacagtttataacgttatattcactcacttataaagtactttcttaaatattttagctcctctacaaggatgtataatccttgaagcaggagctgttcccacccaagaaaatgaaaatctcagtcattaagtacacaaacacgggtccagattgcttggtttcaaatcttggttctgctactggccagctgtgtgatccaagaaaagctactcgacttctctgtgtcttcatctgctcatctgtcaaatggatatatgagtagtcctacttcatggagttgttgcgaggaatccattagtacctctcctagtgcctgcagccacgcaatacatatttgaaaagtaagtggaaatctgtcaagtgtaagttactgtgtggatattggtgtgatgcacagagaagaggaagcactggaagatgatcatggaagggagagaaggcaagcttgcaaaatcagcattggctatttaaataatatctgcctatgatgctgtcaaggaaaaatgttgtggagccgttggaaatgtgacattgaagctcaaaacagaggcctgaggggattgattaatttcccagagccgccataataaggtaccacaaactaggtggtttaaaacaataaacatttattgtatcacagttctggtggccagaagtctgaaatcaggtattggcaggattttgccccctgaagggccctagggaaggattctttcttgccattccagcttctggtggtcccaagtgatcattggcttgcagtagcatcaccccagtgtctgcccctgtcttcacatggccttcactctatctgagtccaaatctcccttttcctacgaggatagcagtcatgttgcataaagggtccaactactccagtgtgacttcatcttaactacttacatctgccacagtcctactttcaagaaagttcacattctgaggtattaaggcaatcagtgtttcagtgtatcttttgagaggacataatttcacccacaacagaagtgatatacatttgggggttactggcatttgaatgctattttgagccaaggctatagagaagagcagccttgtagctaagagctcaggtcctatcaatccatacagacctgggattgacactcagttccattactgactggctcagatcttggtaaagttgcctaacatttcgaagacttagtttcttagcctgttaaaaaagggataataaaacctccaggtttcttgtaaatatgaactgaggaaatgattgtaaagtggtgagcatagcacatcttatagggtgagtcttcagtaaatggtgtctgttagttaagattttgtatggaaagaatctaacctgagaaagaaggaagagtgaggaataaatttttaaccaagaggaaacaccccattttagttagaaatgacccaagagagcaaccagaataatgaaaatactataaattattttctggtgttttggatttatatatagttcaagaatttagccctgtgcctgacctaagacagataatcaatatgcagttggatggctagactgaatgaacatcagggacatatttagccaccagaagaggagtattaagggtacataggtagggaaagaggattgaaagttacctagaaatctggaaggctctgatgcagaagagatattatacctactctgtaaatgtggaactagaactaggggatagaaattatagggagaatcatttttactcaatactgaacatttgctgaggtccccaatcctcaatgtttgcaaacagagatggataacacctagccaaatcatttatacaaggtgtctttgtactggggagatggttggattagaggtctgataaatttatttccacctgtgattccaaattgatgttaaagagactataaataagaaacatttattagatgaaaggaatatgatagacacaatttaagaagagacattaagcagtataaaattccttcctatctaatttagtttctaactcagctctattttcaaaggccaaagctaccagcccttgaattcccattacacttattctcccttatgttagattttatatggaggaggaccaacagtttttgagaagcacctctggatcaaaacaatgatccgtaattccttaagtaaaagctagtaatcatattaatgttctttagaagaaagaaagccaagccaggatagtaaaacagaaagcatttcccatcatttttggataaggcagaagacaaagtccagtttctttcgagtctgaaggggaagtttaaaattttcaggactataaaggacaatgcaagagaggcattgaagcgatgggggaagaaaacagtagggggttccctattttaaaaccacttctgaagtgaattctagcttcatcttgccttcattcccagctccatccttgggaatgaaagatttattcttctagctgcctggaattctgctggctgagagctctacattgccaggcttcttcaggaattgcccgagtggaacagggccaccttgcccacaggtattcccttccttgagcaaccctcatttagtgattgatcaattaatgcatcaaaaggtctgacatattcttcaatcattttttaagatcactgtatttatttgaaaaaattgccaaagaagattgtttctttgcgattttgtgttattattattattaaacagctttagtgaggtataatggatataaaataaactgcacttatttatgtataaatagaatgactttggatatatgcatatacctgtgaaatcatcactacaatcaaggtaatagggaaatcaatcacctccaaaagttttcttccattgcaattttaaaagatgtgttttatataccatgtagataaaaatggaaaattggagcaaaaaaaacaacttctttttatgagaacgttaaaaaaaatattttctagatgtaccaattaaaacatgcttaaaataattgcacatttatccaatttagaaatatgtccagtagccattatcattctgaatgttcacttttaattttcgacatggatctacatcggtatagaaaactgcacactttccttttctctgcaaatacggcacaattttattagttattattctcatgttatacaatagatcactggtcttgttcatcctacatatctgccactttgtaacctctaacctacttatccccattttcttcccacccccagctcctggtgacaactcttttatactccatctctgtatatttttactcttctttaaagattccacatgtaagtgagattatgcaacatttttttgtgtctgtcttatttcacttagcagaatatcatccacatccatctattttgggacaaatgctggggtcttcatttttaaggttgaataatatttcattgtgtatgtgtgtgtatattaggcagataatcaataagcaattgaatgacaaaattgaatgaatattaaggacacatacacacacttttttatccattcatttgtcaaggcatacttaggttgtttccatatcttggctatttgtgaataatgttgcaatgatcatgagagtccagatatctttatggagtgattatttcacttccttttggtatatgaccagaaaaggaactgctgggtcatatgatagttctatttttaatttcttttggaagctccacactgtttccattatggctacaccaatctacatctctaccaacagtgtacaagggttcccttttctccacatcaacatttttgccaacatttgctatttcttgactttttgataatagccatcctaaggaatgtgaggtgataactcatagtgggtttgatttgcattttcttagtgactaaaatgttgagcacattttcatatatctgtgggccattttttatgccttcttctctattcaggtcctttgcccaatttttaattgggttgcttgtttttctactgttgaggtgtgtgagtgctttatacattttggatactaaccccttatcagagatatggtttgtaaacatatttttcccaatccataggctgctgtttcatttttttgattgtttcctttatgtagaagcttcttggtttgatgtagtaatatttatttatttattgttatacagcctaagattttggtatagtatccaaatatcattgccaaggccagtgtcaaggaactttccacccatgttctcctcaaggaatgttatggtctcaggtcttacatttaactcttttatctattttgagttgatttttgcatatggtataaaaatccaattttactcttttacatatggaaataaagttttcctagtgccatttactaaagaaactattctttcccaattgtgttctcttggtgcccttgtcaaaacttagttgaccctatgtgttctaattgatttctgggctctgtattctattccactggtcgatatgtctgttttaatggcagtacccatacagttttaattactgtagttttataaaataattttaaatcagtaattataatgccccaattttcttttgcttgcttagaattgctgtggcaatttttttagttcctaagaaattgtggaattatttttcctatttctgtgacaaatgccactgctatttttacagggattgaatctttatgtagctttgaatagtaagaacattttaacaatattgattctttgaatctatgagcataggatgtcttttcgtttatttgtatcttatttaacttgttgcatcagtgggcttggttacatttattcccaggtatttatatgctatcataaatgtgattgttttattgacatatttttcagctaagttattatttatgtataaaaatgctactaattttttgggtgttgattttgtatcctgcaactttacttaattcatttattagttctaaaagtttgtgtgtgtgtgtgtgtatacactctggggttttctacgtataaaatcatgtcatctgcaaatagaaataattttacttctttttttttccaatttgggtgtctttgttttattttcttcctgtttgattagtcttgctaatacttccagtaccatgttgaataaaaaaggcaaaagtaaacacccttgccttgtgtaggattgtagtaaatatcctttcagcttttcttcattgatcatgacgttagttgtgagtttttttaaataaatgatctttattatgttgagaaactttccttttatacctaaactgttgatggcttttatcaagagagaaagttgacctttgttgaatgctttttctgtgtaaagtgggataattacgtggttttaagctttcattctgttaatatgatgtatcacatttattgatttgcatatgttaaaccagacttgcatgccgaggataaattccgcttaatcaggatgtataatctttttgttacgttgaatttgttaatattttattaaggatttctgcatcaatgattctcagagaaattgacctgtaattttcttttattgtgatatagctgcctggcttagatattaaggtgatacttttctcatcaaatgtgtttggaagtactacctctagttttattttgtggaagagtttcaggagtattagtatgaatgaattcttctttgaatgtttggtagaagttatctatgaagccatctgcttctcgggttttctttgttgagaggtgttttattacttctttaatatctttatttgttattgttctgttcaagctctctacctcttcctgtttcaaatcttggtaggttgtatttttctaggaatttatccatttcctctagcctatttaatttgtttgcatgtaattgttcataatagccctttatgatcctttttatttctgaggcaaatgttgtaatgtctctactttcattgttgattttatttattgtttttcatttatccttacttagtctagctaagggtttgttgattttatttttgttaaaaaactcttagttctatttgtttttctatggtgtttgcattttctatttgatttatttctgttttgatctttactatttcttttcttttgcgaactttgagtttagtatgctcctctttttccagtcccttgaggtgtaatgttagattatttactttgaatctcccttcttcttattttgttttgagacagggtctcattctgttgcccatgctggagtgcagtggcacaatcctggctcactgaaacctccacttctggggctcaagcaatcctcccatctcagtctcttgaatagctgggactacaggcacgcatcaccatggcaagctgatttttgtattttttttgtagagatgaggtttcaccatggtgcccaggctggtcttgaactaatgggctcaagttatccacctgcctacacctcccaaagggctgggattactggtgtgagccaccatgcctggccctctttcttgttttttaatatagacatttattgctatgcacttccctcttaaaactacttttgttgcctcccataggttgtgttttgctgtgtttccattacatttgtctccatatacttttagatttcccttgtgatttattgtttgacccattggttgtttctttatccaatcttgccttcccttccatagatattgattctgaaagcacaaccaacctttctgtactctgatctctgtcttaaagtctccttcttagcaaaccaacctgtgctttcttctttcatatcttttctcctttcagctacaatctgatttttcttgtgtttacagcaaaactgaaaagatttttttatattcatcattttcacatccttaccttccattttctcttgaacacacaacaattagacttagttgctgctgctccatagaaactgttcttgtcaaggtcaccacaaattcatcctgtcaagtcccatcatcctcatgttggattacctctcagcaacatctgccatagttaaataatcttcttcccaagaatgtacttggttcctgggatatcacactcacttggttttcctttcctcacttgctgtttcttctcagtatcttttgctgggtcaccttcatctttccaatctttaaatgtctgtgaactccagaacttcatccttgactttcttattcatcttcaattactccctaggtcaaaaatcagcaaacttttcccataaaagaccagatagtaaatattttaaactttagggcaatgtggtttctgctgcacctacttaactctgccattgtagtgcaaaagtttccatatagaatatacaaaaacaaacattttcatgttccaataaaaacaaccaatggccatatttggactgatggttatagtttgtagatctctgttctatgtaatctcatctggttccacaactttaaatgttattactgactaccgtaaattccagactgagatagttaagctgctacttggcatcgctcaaaagtagtatgtactaaaaggaaactttggacttttgttgatctattcctcaacctgtttctctcccagtctttcttactggcaatgcaagacacatcaccatttgcgccttattgataccacctcattacctttatccttcattgccagccaggttcaagacatgaaattcattcatctggattagttcagtagtattgagcaggtctttctgctttccctctaagctcccaagagcctagtctttgtagaatggcaaaaataaatttcttgaacatttcttttaaaaaagaaaattagattttaacatttccttctcattttgaacaaatttcaagcttcttcccaagacccagaaggtcccaaatgatctggtctttcctcacgtttgtggttttgtggtctgttcttcatgctcattccctcccagccacacttgtctttttgctgttttgagtgttcagtttatacttgccatgaggcctttgctgacccctctatttggaaatattttcccccaatttctaacttgcctcatatccttaactaatttgggtttttgtttaaatatcatctcttcagagaaagatgttttgattccctatcttaatagattcctcccatcattacccagttcctttttaccttgctttatcttttaaaaacgatacttaatgagtaccaaaaattattttgtacatttatttctttatttgttatttccctctactacaa

SEQ ID NO: 721 - DNA, 9817 bp, Homo Sapiens
attcacagcgtatgacactgctgtcatcatgtctcctggattccttttttttttccctataacagctctatcaagctataattcacatgccttaaaattcaccttttttgaaatgtacaactgagtgatttgtaatatattcacagagttgtgcaatcttaacaactacttaattccagaacatttacatcacttcaaagaaaccccataccctatagcagtcactcccaattctcttcttccacccattccctggaaaccactaatctactttccgtctctttggatttaactactcaggacattttatagtcagcacgtaagccggactgtctaggaaaacctccccttcctgtgtctggaggtgttgaaaaaaataattcaacaatgctgcccctgctggccaccagtgtaccatgcaataattccatggcccctgccacagcccaggaaatggaggaaatggccaggcagccacattctctcatcctgcagaaggacccttctaggtgttagaggttgagggattttggctacatatggccccatacatcttcctagctatagattccaatggaagaagagaactttctttcctctactgagtgcatataaacttctgcatcttgcttctggcctcaacttgatcttcagcatcaacatcaagcagagcagcatgagatgcagtgcaatgaataaacagttcttggtcacgggcttgcccttgcagtctggaaagaaaatcctgcaactgagagagccaccatgatttcctgaagtatttggtgaagaaccattctccaaacgtgaagtcaggagatatgtattgctattatcagagctgaggaaaagacactagaagtttgaaatctcagatgtccacagcatcatgacacatagttaggattccatgctgaatagaagggggaacctactgaagagttttcagcagaagagagacccaataaaacttgcgtgtaaattataaccattgcttctgtatagcattctgattggagagtcaggtatagatgcacagagagcagttagaaggttattatagtagtctagaagtgactgtggacttgtagggaaatggcaaatatttagaaaacaaattcaataacactcagcaatcagttggacttggggtatgaggaagggagaaatgtctggtctgattccatcacaaggccttgtatatgctgttccctttgcctaaaaattcccttagctcctcttttaacctggcgaaatgttgctccttcatcaggtctcagcttgagcatctcttctccagggaaattgatcctcttgcctttcccctgtttaatttcccttcccatcacttatcacagtttataacgttatattcactcacttataaagtactttcttaaatattttagctcctctacaaggatgtataatccttgaagcaggagctgttcccacccaagaaaatgaaaatctcagtcattaagtacacaaacacgggtccagattgcttggtttcaaatcttggttctgctactggccagctgtgtgatccaagaaaagctactcgacttctctgtgtcttcatctgctcatctgtcaaatggatatatgagtagtcctacttcatggagttgttgcgaggaatccattagtacctctcctagtgcctgcagccacgcaatacatatttgaaaagtaagtggaaatctgtcaagtgtaagttactgtgtggatattggtgtgatgcacagagaagaggaagcactggaagatgatcatggaagggagagaaggcaagcttgcaaaatcagcattggctatttaaataatatctgcctatgatgctgtcaaggaaaaatgttgtggagccgttggaaatgtgacattgaagctcaaaacagaggcctgaggggattgattaatttcccagagccgccataataaggtaccacaaactaggtggtttaaaacaataaacatttattgtatcacagttctggtggccagaagtctgaaatcaggtattggcaggattttgccccctgaagggccctagggaaggattctttcttgccattccagcttctggtggtcccaagtgatcattggcttgcagtagcatcaccccagtgtctgcccctgtcttcacatggccttcactctatctgagtccaaatctcccttttcctacgaggatagcagtcatgttgcataaagggtccaactactccagtgtgacttcatcttaactacttacatctgccacagtcctactttcaagaaagttcacattctgaggtattaaggcaatcagtgtttcagtgtatcttttgagaggacataatttcacccacaacagaagtgatatacatttgggggttactggcatttgaatgctattttgagccaaggctatagagaagagcagccttgtagctaagagctcaggtcctatcaatccatacagacctgggattgacactcagttccattactgactggctcagatcttggtaaagttgcctaacatttcgaagacttagtttcttagcctgttaaaaaagggataataaaacctccaggtttcttgtaaatatgaactgaggaaatgattgtaaagtggtgagcatagcacatcttatagggtgagtcttcagtaaatggtgtctgttagttaagattttgtatggaaagaatctaacctgagaaagaaggaagagtgaggaataaatttttaaccaagaggaaacaccccattttagttagaaatgacccaagagagcaaccagaataatgaaaatactataaattattttctggtgttttggatttatatatagttcaagaatttagccctgtgcctgacctaagacagataatcaatatgcagttggatggctagactgaatgaacatcagggacatatttagccaccagaagaggagtattaagggtacataggtagggaaagaggattgaaagttacctagaaatctggaaggctctgatgcagaagagatattatacctactctgtaaatgtggaactagaactaggggatagaaattatagggagaatcatttttactcaatactgaacatttgctgaggtccccaatcctcaatgtttgcaaacagagatggataacacctagccaaatcatttatacaaggtgtctttgtactggggagatggttggattagaggtctgataaatttatttccacctgtgattccaaattgatgttaaagagactataaataagaaacatttattagatgaaaggaatatgatagacacaatttaagaagagacattaagcagtataaaattccttcctatctaatttagtttctaactcagctctattttcaaaggccaaagctaccagcccttgaattcccattacacttattctcccttatgttagattttatatggaggaggaccaacagtttttgagaagcacctctggatcaaaacaatgatccgtaattccttaagtaaaagctagtaatcatattaatgttctttagaagaaagaaagccaagccaggatagtaaaacagaaagcatttcccatcatttttggataaggcagaagacaaagtccagtttctttcgagtctgaaggggaagtttaaaattttcaggactataaaggacaatgcaagagaggcattgaagcgatgggggaagaaaacagtagggggttccctattttaaaaccacttctgaagtgaattctagcttcatcttgccttcattcccagctccatccttgggaatgaaagatttattcttctagctgcctggaattctgctggctgagagctctacattgccaggcttcttcaggaattgcccgagtggaacagggccaccttgcccacaggtattcccttccttgagcaaccctcatttagtgattgatcaattaatgcatcaaaaggtctgacatacttccatcatccagggacgtctctgaaggccatctcagcttcagagctccccatgaagttgactgaagtttttattggattttgtgtcagtcaacttcttcaatcattttttaagatcactgtatttatttgaaaaaattgccaaagaagattgtttctttgcgattttgtgttattattattattaaacagctttagtgaggtataatggatataaaataaactgcacttatttatgtataaatagaatgactttggatatatgcatatacctgtgaaatcatcactacaatcaaggtaatagggaaatcaatcacctccaaaagttttcttccattgcaattttaaaagatgtgttttatataccatgtagataaaaatggaaaattggagcaaaaaaaacaacttctttttatgagaacgttaaaaaaaatattttctagatgtaccaattaaaacatgcttaaaataattgcacatttatccaatttagaaatatgtccagtagccattatcattctgaatgttcacttttaattttcgacatggatctacatcggtatagaaaactgcacactttccttttctctgcaaatacggcacaattttattagttattattctcatgttatacaatagatcactggtcttgttcatcctacatatctgccactttgtaacctctaacctacttatccccattttcttcccacccccagctcctggtgacaactcttttatactccatctctgtatatttttactcttctttaaagattccacatgtaagtgagattatgcaacatttttttgtgtctgtcttatttcacttagcagaatatcatccacatccatctattttgggacaaatgctggggtcttcatttttaaggttgaataatatttcattgtgtatgtgtgtgtatattaggcagataatcaataagcaattgaatgacaaaattgaatgaatattaaggacacatacacacacttttttatccattcatttgtcaaggcatacttaggttgtttccatatcttggctatttgtgaataatgttgcaatgatcatgagagtccagatatctttatggagtgattatttcacttccttttggtatatgaccagaaaaggaactgctgggtcatatgatagttctatttttaatttcttttggaagctccacactgtttccattatggctacaccaatctacatctctaccaacagtgtacaagggttcccttttctccacatcaacatttttgccaacatttgctatttcttgactttttgataatagccatcctaaggaatgtgaggtgataactcatagtgggtttgatttgcattttcttagtgactaaaatgttgagcacattttcatatatctgtgggccattttttatgccttcttctctattcaggtcctttgcccaatttttaattgggttgcttgtttttctactgttgaggtgtgtgagtgctttatacattttggatactaaccccttatcagagatatggtttgtaaacatatttttcccaatccataggctgctgtttcatttttttgattgtttcctttatgtagaagcttcttggtttgatgtagtaatatttatttatttattgttatacagcctaagattttggtatagtatccaaatatcattgccaaggccagtgtcaaggaactttccacccatgttctcctcaaggaatgttatggtctcaggtcttacatttaactcttttatctattttgagttgatttttgcatatggtataaaaatccaattttactcttttacatatggaaataaagttttcctagtgccatttactaaagaaactattctttcccaattgtgttctcttggtgcccttgtcaaaacttagttgaccctatgtgttctaattgatttctgggctctgtattctattccactggtcgatatgtctgttttaatggcagtacccatacagttttaattactgtagttttataaaataattttaaatcagtaattataatgccccaattttcttttgcttgcttagaattgctgtggcaatttttttagttcctaagaaattgtggaattatttttcctatttctgtgacaaatgccactgctatttttacagggattgaatctttatgtagctttgaatagtaagaacattttaacaatattgattctttgaatctatgagcataggatgtcttttcgtttatttgtatcttatttaacttgttgcatcagtgggcttggttacatttattcccaggtatttatatgctatcataaatgtgattgttttattgacatatttttcagctaagttattatttatgtataaaaatgctactaattttttgggtgttgattttgtatcctgcaactttacttaattcatttattagttctaaaagtttgtgtgtgtgtgtgtgtatacactctggggttttctacgtataaaatcatgtcatctgcaaatagaaataattttacttctttttttttccaatttgggtgtctttgttttattttcttcctgtttgattagtcttgctaatacttccagtaccatgttgaataaaaaaggcaaaagtaaacacccttgccttgtgtaggattgtagtaaatatcctttcagcttttcttcattgatcatgacgttagttgtgagtttttttaaataaatgatctttattatgttgagaaactttccttttatacctaaactgttgatggcttttatcaagagagaaagttgacctttgttgaatgctttttctgtgtaaagtgggataattacgtggttttaagctttcattctgttaatatgatgtatcacatttattgatttgcatatgttaaaccagacttgcatgccgaggataaattccgcttaatcaggatgtataatctttttgttacgttgaatttgttaatattttattaaggatttctgcatcaatgattctcagagaaattgacctgtaattttcttttattgtgatatagctgcctggcttagatattaaggtgatacttttctcatcaaatgtgtttggaagtactacctctagttttattttgtggaagagtttcaggagtattagtatgaatgaattcttctttgaatgtttggtagaagttatctatgaagccatctgcttctcgggttttctttgttgagaggtgttttattacttctttaatatctttatttgttattgttctgttcaagctctctacctcttcctgtttcaaatcttggtaggttgtatttttctaggaatttatccatttcctctagcctatttaatttgtttgcatgtaattgttcataatagccctttatgatcctttttatttctgaggcaaatgttgtaatgtctctactttcattgttgattttatttattgtttttcatttatccttacttagtctagctaagggtttgttgattttatttttgttaaaaaactcttagttctatttgtttttctatggtgtttgcattttctatttgatttatttctgttttgatctttactatttcttttcttttgcgaactttgagtttagtatgctcctctttttccagtcccttgaggtgtaatgttagattatttactttgaatctcccttcttcttattttgttttgagacagggtctcattctgttgcccatgctggagtgcagtggcacaatcctggctcactgaaacctccacttctggggctcaagcaatcctcccatctcagtctcttgaatagctgggactacaggcacgcatcaccatggcaagctgatttttgtattttttttgtagagatgaggtttcaccatggtgcccaggctggtcttgaactaatgggctcaagttatccacctgcctacacctcccaaagggctgggattactggtgtgagccaccatgcctggccctctttcttgttttttaatatagacatttattgctatgcacttccctcttaaaactacttttgttgcctcccataggttgtgttttgctgtgtttccattacatttgtctccatatacttttagatttcccttgtgatttattgtttgacccattggttgtttctttatccaatcttgccttcccttccatagatattgattctgaaagcacaaccaacctttctgtactctgatctctgtcttaaagtctccttcttagcaaaccaacctgtgctttcttctttcatatcttttctcctttcagctacaatctgatttttcttgtgtttacagcaaaactgaaaagatttttttatattcatcattttcacatccttaccttccattttctcttgaacacacaacaattagacttagttgctgctgctccatagaaactgttcttgtcaaggtcaccacaaattcatcctgtcaagtcccatcatcctcatgttggattacctctcagcaacatctgccatagttaaataatcttcttcccaagaatgtacttggttcctgggatatcacactcacttggttttcctttcctcacttgctgtttcttctcagtatcttttgctgggtcaccttcatctttccaatctttaaatgtctgtgaactccagaacttcatccttgactttcttattcatcttcaattactccctaggtcaaaaatcagcaaacttttcccataaaagaccagatagtaaatattttaaactttagggcaatgtggtttctgctgcacctacttaactctgccattgtagtgcaaaagtttccatatagaatatacaaaaacaaacattttcatgttccaataaaaacaaccaatggccatatttggactgatggttatagtttgtagatctctgttctatgtaatctcatctggttccacaactttaaatgttattactgactaccgtaaattccagactgagatagttaagctgctacttggcatcgctcaaaagtagtatgtactaaaaggaaactttggacttttgttgatctattcctcaacctgtttctctcccagtctttcttactggcaatgcaagacacatcaccatttgcgccttattgataccacctcattacctttatccttcattgccagccaggttcaagacatgaaattcattcatctggattagttcagtagtattgagcaggtctttctgctttccctctaagctcccaagagcctagtctttgtagaatggcaaaaataaatttcttgaacatttcttttaaaaaagaaaattagattttaacatttccttctcattttgaacaaatttcaagcttcttcccaagacccagaaggtcccaaatgatctggtctttcctcacgtttgtggttttgtggtctgttcttcatgctcattccctcccagccacacttgtctttttgctgttttgagtgttcagtttatacttgccatgaggcctttgctgacccctctatttggaaatattttcccccaatttctaacttgcctcatatccttaactaatttgggtttttgtttaaatatcatctcttcagagaaagatgttttgattccctatcttaatagattcctcccatcattacccagttcctttttaccttgctttatcttttaaaaacgatacttaatgagtaccaaaaattattttgtacatttatttctttatttgttatttccctctactacaataaaaatttgagagggcagagaccatgtgtcatttgtttcttgctctatttatgatgcatataaaagtatgtggaatgtatcaggaaaacaataaaaatttgttattgtttttcatttaagcatgatgt

SEQ ID NO: 722 - DNA, 1321 bp, Homo Sapiens
agctaatgaaaaggattatacactatgactaagtgggatttgttcctggagggtgttcaaaatacaaaaatcaaacaatgtaatataccatattaatagaatgaagataaaaatctcacatgttcatcttaactgatggaaattaagcactcaacaaaattaaataccccttactgatataaattactcaacataataaagcctacacagtagatattacttgtattggttcatgttttatacagtcagtgtttatttgtataccaatttcatttttcactgttcctctttcttctcaaacttcctttctggatttaattttttcttcctggaattcgtccttgagaattcctttagtaaggcccattgatgttaaactctttccaagttttgtttttatgaaaaatatattttgctctcatttgtgaaaaacttacatgattctatgttgaattattttgtctcagcatgtagaagataccattctactgtcttccatcttttgttattgctattgagaattctgctggtctaactgcttctttgaagttactctctttgactgtctacctcctttaagtaccttttaaactttcagattctgagttttactaaatgtatccagatggcattaaaaaatttttttctgccttgggtttcattgcatttcatgaatctccaaattcatgcccttctctctccttaaaaatttaccaatcctgaactattgctcaaataaatataatctctaaatatttcctatttcccattttatcaattctctccttttgaaaactccaattaatttttttattaaaccttctcattatatctgccatgtttctaaaactcctttcctagataatttcttcttgactatattctagttcactacttctctcttcatttgtatctaatgggctatttaactgttacactgattttttttctgaccataatttttaatttaggaagtctggttgaacataaaggaagcctatacactggaataaatatgaagctgctgcatatgattcttattccaaaataaggcctaatcagcattaggctgagatcttcattggtggcataagaagttcaaccacttgagtggacataatctccaaggtggaatggacctggtaatggactggatgacatgctggactttaggaatatccacaaatctgcatgaggtctctcctgctacaggccattggtgtggaagagaagatttttctaattgaggttgattatggaatgaaattaaagggtgggaaggaaaggttttcacatatgatcagagaacagagataccact

SEQ ID NO: 723 - DNA, 1995 bp, Homo Sapiens
cactttcctgcgagtcgctctccgaagtgtcgctgtccaccggctcctcgtccggggtgtctctcacagccagcagggccactaagtcggggacaccatttttgtcttctttggtgttcaagcggatggattcggccccagctggctccttctctgcctcttctttcttcgatttgtcggtgacggtgaccagagccaagaactcgcggggaccgtcttcttccccctcggagttgcagggcgcccactgcctaaccagctccctggcagcggcctgcagcgtggcgtacagcgcgctctggtcctcttctccgctcaggtcgccctggtcgatctcctcgatcacgatgcccaggctctcgtcggaagagtcctcggcctcactcctcgcgggagcagacggccgtcctcctcggcttctcttcttgcccttctgggtcaacctgttgcgtctggttctgtttctgcgaccccgacggcccctccttgggttcctggctgccccaagaagcgagccagcctgccctgttacctccccagaatcctgggcctgcgtctccgaagcgggaggggtgggtgcctccccgggggtcccagcctccgcggcctgcgtgggcccgtcatccagcagcaggcgtctcatctgcctcaggaccctcgtgtcctgcgcacggtccttccacagaaccctccagaccccatccttgcctgggatctccctgggaatggcagcgtgattgacgtcctccacaaactccaccagggcggcctgggccttctcgttcatcaaagccttcatgtgtcgcaacctgaacgtgcccaggggcaggagggtcggctgcaggacggcttcgacgtctgcctgctccaggccctccgggatgccggtgaccagcagggccctgtgcgcgtccacgtccaggctccggcaccagtcctgcaaaaggctcatggccatggtgcagcccccttggcgctgatcttggggcagcagggagcccgagataggggtgggctgcagcgcacggtgtcaatgcaaccctagaaagccacttgcagggcttagagtcccggttccggtgaatgtggcaaggctggagtggggctcggggctcgggggctctagctgcctgctggccggctggacgcagtgaccttcccccgggacccctctccagagctgtctgaggatccgcggggggcttacgtgtctgctttccaggacagctccctccctctctccctgacacaggcctgagtgactcggcaccgcagccaggtgcaggggggcggcgccgagtgcacctggagaggcgtgggaggtagcagccgcagcttgcctggcgctcgcgccgcgtctgagcgcgcaccctgggcctgaatctcagcagttccgctgcgacgcggctgctcgcgcgtgcgcctgcgcagagggagccgcacaccctcccctgtcccccgcccaaccgtctccatggcaacggtgcagccttgagctggggtctgcgtcgctgtggcctgagacgcttttcttaaaggtcccgatgacaaggacttggggcctggaagcaccactttcattaaccagcaaaaaacaaggccgaaaccacagagggccagaaatcactcaaggatacccgacctcattcaggggatagaggcctccttccagagggtaccggcatcactgggggttacaattcccccttccaggggccaggtggaattcaggattatataggcctaaatcaaagggcactggccttgcagcgtaggaccaggacttactcgggatactggcctcattcacagtatatgggtctcagtatcaaataggggggcccaggcaccacctgtgagcaagacaccattcagggtatatgggcctcacttgcagggtacaggccccactcgatgggaccggccctcactcccatacacgttcctgtattctgaactatgcatgcacaataaatcctgtggttttgcacacgc

SEQ ID NO: 724 - DNA, 1428 bp, Homo Sapiens
ggaagataaaggcagagatttacaagccaaggaatgtcaaagacggccagcacaccaccagaagctagcagagaggtatggaacagattcttcttcacaacctcagagggaaaaccctgctgatacctggatttcaaactcctggcctccagaacgaagtccctggagagaggacgtgatgtctgaagctatggcagccatcttgtaactatgaggccacaaacaagaaaagcaaaaaccagagtgaagcatggcagagcagaaagatggaaagaacctggatacataagagtgtcactgtgcagctgtacccaccctagactgcatatacctggactttaagtaaatgacaaatatcctttattctatctcaagccattgcttcttcatcttttttgtgtcatgacaatcacagtgggcggtaatatttgtactgccctctggggaacacagaggagactgctggcacctgaggtgaactatgctgggggcttcagctgccccaggactcctccctaccttgaagcctgaggggatacatatctctctgcacatctctttgtggctcatcaatgggcctcaccatacacgttgaaaagttctagtttaagccatacttacctgttacttggctgaatgcacttctaagtaaaacttggactcaatgctgcttgtcaatggaaagtgatgagatttataagatatcatacattctctagcaacatatgaatatgcaaaaaatactgatcttagcccaaatcacatcatatgattctactgacagaactatttgctatttaactcgtgttctttcttgtcagtaatggggccacttcctgattaactacaggcacatttcatgagatccaaacatagaaatttttctttctttttttttctgagacagagtctcctcagtcgcccaggctggagtgcagtggcacgattttggctgatgcaacctctgcctccggggttcaagtgattctcctgcctcagcttcctgagtagctgggaatacaggcacttgccatcatgcccagccaatttttgtatttttctagagatggggttttcccatgttgactagactggtcttgaactcctgggctcaagtgatcctcctgcctcagccttccaaaatgctgggattacaggcatgagccaccttgcccggcctataggaatgtttcaaacgatgcatttgagagtacattcataatggttgaagaattatagattttagggaaaaaagtttcattttatctagaagttcatcttatgggtcaagttattatgttttttatatggtcttaggtttgggtacacaatgaccttggcaataattgatttttctatgagcctgacattaatgtttctaagcaagtcccttttgtcagctccactggtgcttaccgtagagggttg

SEQ ID NO: 725 - DNA, 2763 bp, Homo Sapiens
aggtggataccaccacactgtcttgtagatgttgatgtagtggacgaagagtgctatgagctggcagaagaagagctgcaactcaaacagaatgctggcctggactggcagctcggggatcttgcagtgctgtagaggcacaacagtttgggtggccagaggagggctggagaggcctgttccagaactgctcctgacagtggggagggaacaacatcagcagctgacctgagaatcctaccaggaagggcttctgaggcaaaggattgtgggataagatcagaaaagcagctcatagcaaggacggggtcttcctaatcctgcttgtcagacaaaggaacccgacaaagccttttcctatccctaatcttattcaggtcttccaacaccccctaggagagaaagaattattaggtccatcttacagatgaggaaaaggaggcccagagaagggaggcaacttgtccaagccatcagcaaatctggagcagaactgtaattagaatccaggcctttggatttattctaccatgtcccactgcatctgtccaagtgatcaccctcaactgagctccctctggatcttttctgctgcttactcccctctaagcccccactggcatctaggatttcacatcttagaatccagtcagagagagccctgtccacatcgtccctgtgaggccacagtgaggggtgagacagagaggtggtttacctggtgcgggaacgaacactggtcaccgatgcactggaagtgtggcttccactagagccccccgaggatcccggctcacagagcggatttcgacagtaagatgtcctgttgggacctcttcgtcctcctgtggggctcaacataaaatagagcctcaagccagggggcatatatcaaggataacagcaatgataccagctgccagtcacctagtatctcactttatcatttaatcctcactgagacctatgatctggccccttcttacatcttcagcttcatcccctatcattctctacctcacacccaccctctaccacccgccccatgctctaaacatcttgatctttctttcctcagcaagccaagctcattgctacctctagcacttataatatcctatctggaaagcctttcccggactgccatttctgaagttttgaagtaactccccatcactctctctccaatttctattctttttttccaccagaattcactctctgaaattatcttactcatttgttaatatgcttattgcttgtctgtcctattacaatgaaaggtcaatgaggtcagttaccttatctttttcactgctatatcccctacctcagtgcccagcaagtatatgttgatgagtgaatgaacccagcaaggtaggtttttcacacattaggaaactcagcttacactatgtcacagtatcgtggctgggtcgtgtgctctcaactctggtacacattgggccccattcagacataagtttctggaggcctataactctgggtaactttgggacagctttttcatccagggccccatgattcagctcaaagggcattctgggatctcatgggcaggacccagggcctaaataaagggtcaaggatatggctgggagaatcctgtggctgtggactgaaaaattggacctactaggctgagcagtctagcccaagctcccacgcaccacttcgcacaaaagttctgcacaaagctcctaagcacctaaaaaagtcacaacctgactgggtgtggtggctcacgactgtaatctcagcaatttgtgaggccgaggcgggaggatcgcttgagaccaggagttggagaccagcctgggcaacatggcgaaacccggtctctattaaaaaatatatatacatacatatacatatttttaaaaagttataacctgttcatacctcttcacagtaacacagcagcctccattcacatacaccccacgccgtagcatctcagctcggaagcgtttcccacacttcggagccaattttgggcttggatgtatgcccaaaattataaacctccacaagtctctaaaaagtacctggcgaagagctctgccctccataaacccccagaccagaagctctgttcatacgctgttatacttggcttagaaaatcccacacaaacacccttagtccagtccagaagctctgcccacacccactctcctctctttagaagctctgcacccacataaagcccctcagcccagaagctccgcctacacacaactgtcagcccagaaaccccgcccacaagccaataaaagccctctcagcccagaagccccactccagaatgggctccctcagtcggaagtctccccgctccaccgcccccagtgtaacccctccaacccagaaacgccgactgcactagcgccccctgcccagaatctccacccttagcgctgaagccacgcccactggtaagtcccgcccccctttctagccccgacgagctggtcctcacgaaagcccaagcccccacagggcttcgtcttagaagccccgcccaccgtccaatgtcccgcccccacaacagaggccccaccccgcaaaacgacaggagggggcgggatcccgtctgcgctcgcatcccctccccctcccgtcaccgggctcctgtccgcgtggagcagcaattagcagcctggccatcctaacccgtgcgcccgctcgttgccaggccgagcctgagccgctctgctcacccatctcctccccccggtg

SEQ ID NO: 726 - DNA, 5998 bp, Homo Sapiens
gcagccgcctggcgtgcggagagcggcctgtcgcgcgctgggcgcggggactcagggtcccagcagtgggtcgcgcacctgagctatctccatcctcggagaccgacgagctctcagtgtcctcgtcctcggagctgctcccctcattttcggcgtagtccacctccatctcatcgtgatggttggtctccttcttatcccctcgggaatggactggcattttccagccgcgccgtcgctttccactaccggcgcccagcccggccaccgccgcttcaatgaagggcgcgcggaacgccccaacccacccagccaccgagcttgctcgcccccttggctcctccccgcccccggcccgggcctcacaacctaacccgcaggctctgcgatgggagctctgccattggcggaggccttccaccgagccagagggcgggggcttgccctgctctggtacgattggttgcccgcaattacgacgcggccttccgatgcttgccgggagttgtagttcgtaggtctcagacctgcaggggctgcacgcttccatccctcggcagccctgatcacttcttccttctggacttcaagtcccacaaggcacgaaagctgacactctggatcgcagtttataaactaaacagaaacagattgtgcgaatttagtctgtatttatctatttcccgccaagtgattgtttgacctgcctgaccatcagagatgttactgttagatgtgaaaatgtcttttgcctaaaaggatctttgcctgctcattgagcctggggaactggagaaccatctgttttactaagcacctttattacctaccattaataaactgttttatttaattattaactatagacgataacttgcactttctgtgttgtgcaaaaatctttaaattattcttgaaacttttacaatacagaaggtaaggaagttttatcttggcattttcaatctaatatttttggcatttattttttaccaaatgcagtcggaaaatgccatcagtcctgatttaactttagttttcaatgaaaaatacatacttaaccagatgtactttctcaaaaaaagggtacatagctccctctccctctccctcgccctcgccctcgccctcgccctctccacggtctccctctccctctctttccacggtctcccactgatgccgagccgaagctggactgtactgctgccatctcggctcactgcaacctccctgcctgattctcctgcctcagcctgccgagtgcctgcgattgcaggcgcgtgccgccacgcctgactggttttcgtatttttttggtggagacggtttcgctgtgttggccgggctggtctccagctcctaaccgcgaatgatccgccagccccgacctcccgaggtgccgggattgcagacggagtctcgttcactcagtgctcaatggtgcccaggctggagtgcagtggcgtgatctcggctcgctacaaccacctcccagccgcctgccttggcctcccaaagagccgagattgcagcctctgcccggccgccaccccgtctgggaagtgaggagcgtctctgcctggccgcccatcgtctgggatgtgaggagcccctctacctggctgcccagtctggaaagtgaggagcgtctctgcccggccgccatcccatctaggaagtgaggagcgtctctgcctggcagcccatcgtctgggatgtggggagcacctctgccccgccgccccgtctgggatgtgaggagcgcctctgcccagccgcgaccccgtctgggaggtgaggagcgtctctgcccggccaccccgtctgagaagtgaggagaccctctgcccggcaaccgccccgtctgagaagtgaggagcccctccgcccggcagccgccccgtctgagaagaacatctggtggaaccccatgatggcggtcttcatccgccttaagctggcccacaaccatgctgatgatgcagctatgcggcgtgagctgatggtcctgcgcggtgatgctgtgctggattttctggaaccgaaggctagacaacttctccacaatggcagctttcccctggaactgttgtccttcccacgtaaggcatgatgcgtcaatgtaaattgcgcctagttggggtctatcgttatcaaataactggtagtaatgtggaatgaagctggatcctatctgctcccaaattggcttgtctcccactctggaccgtcagccggcctcgcggagacccgaggggctggcacgatggctgcagcggcggcggcaacccagcacggtctcaaaatgctcatatttttaagtggtctcatgcattacgtatgctacaacttgactttctccttagtgacgtttttgagatttacccattgtgattcaggtagctctcatccagttatttttacctgccataacatgttccatttagtaaatatattctattgaatgaatattacagtttacccatttacctattaatggacagggaggctgctcccaattttttcactattaaaaacatttgtctcagacccagcacagtggcttacgcctgtagtgccagcactttggcaggctgaggcaggcggatcgcttgagattgggagttggagaccagcctgggcaacatggcgaaaccccgtctcaacaaaaaatacaaaaattagctgggcgtggtggtgcgtgcctgtagtcccaactacttgggaggttgaggtaggaggatggcttgagcctgggaggtccaggcttcagtgagctgtgattgtgccacttcactccagcctgggtgacagacagagtaagcccctgtctttaaaaaaaaaaaaaaaaaagttgcctccgtgaacattgcatttgtttgtttgtttgtttgtttgtttgcttttttttggacagagttttcctcttgttgcccaggctagagtgcaatggcaccatcttggctcactgcaacctccgactcccaggtttaagcaattctcctgcctccgcctccggagtggctgggattacaggcgccccccaccatgcccggctaattttgtggttttagtagaaatagggtttcaccatgttggtcaggctggtctcgaactcctgatctcaggtgatccgcccacctcagcctcccaaagtgctgggattacaggggtgagccaccgtgcccagcatgaacattgttgtatgcaccttttcttcaggcatatgtgtgagaatttctctaggtcagtgtctccaaagtgggaggagtgtattcgagaactgtatcctggggggcaggaaggaaatattaaaatataaatttataaaatttttaatttcatctttgtttggaataaagtaggtataaggaagcagttagaattccaggttttactctgatttaccctcattatattccttgtgtttgtttttaatcagcagatccagcttctgaaataaagcaaatttaattccaggctccaccacatggtggggcagagacatcagctatacaatccgtaaactttgtctactgattgactcaggccaaatgctaggagttggaaaaacaaagataggacaccagagctgctactaatagctagtatcgaatcaggataaatattctcatcattcgaactaaaggggctttaggacctacactgagaactagatgagaccaacttataattattccaactacgtgaaaatgtgattccaattgcttaagaatgaaacaatcccccaggctcagtggctcacgcctgtaaaaccagtactttgggaggctgaggggggcagatcacttgagccaaggagtttaagaccggcctggtcaacatggtgaaatgccgtctctactaaaaatacaaaaagtagctgagcgtggtggcgcatgcctgtggtcccagctacttgggaggtggaggcatgagaattgcttgaaccttagaggcagaggttgtagtgagccaagatcacaccaccacactccagcctgggtgacagagcaaggctctgtctcaaaaatttgtaagctgaaccaattgaaatgtttatggtgttggctattgtttgtgctgttaatcatcagtcctcttcaatcagggcatgaccaagattaactttttcctcccaaattgatgtggatggtctagctgtgggcttcatcttcaacatcatcttgtcccttcttaaaataagttatctatttgtaaactgctgattcatttggagcatcatccccataaacttcttgtaaagcatcagtgatttcactatccttccatccaagcttcatcataaatttggtgtttgttcttgcttcaacttaagcagaattcacattgctctgataggggctctttacaaactgatgttttattcttctcagtgcctcaaattggattctgtccagacatgttataacaagttaatataagcttattttgttgaaaaaaaattgacatctatagttttggaatttttgttttgttttgtttgttgagacaagttctccctctgtcgcctaggttggagtgcagtggtgtgatcacagctcactgcaacctctgccttccgagctcaagcaatcttcccgcctcagcctcctgagtagctgggactaccggcacgtgccaccatgcctggctaatttttgtattagccatgggcaacatgtctcaccctgttgcccaggctggtcttgactcctgggctcaagccatccacctgcctcggcctcccaaagtgttgggactataggtgtgagccactgcactcagccagttttttttgtttgtttataatacacatttttcatgaactttttgaagaccccctcatatctctctcttaattcttggaaggtaagataacaacctagtttaggtttggtgaggtgaaactttatcacaggtgactccattttgactttcagtctgatctgtgggggcctagtgcaggaacttagtccaaaacaacagcctcctataatttgtatttaacctgaagtactgttctggattcaatagattcattggtgaataaatgagacacagcttatgacttcatagaacttagggaaaagtagagagataaatattaagcagcttgacaaactgaggtatgctctctgatggtgttaggagagtataatacagagacccaattgagattgggagtggacggcaggtaagacctctctaaagtagtaatatttcagctaagacctgagagatgagtaggagttagcccagatcggaatgagaggagggacattataagctgagagaatagtgtatgttaaggtcctgaactagaaaaaaacttggcatattcatgtttgaggaataaagagaccactgtggatggttactaatgttcaagaatgaaagagacacaaggtgtgtttggtgaggtaagcaaaggcttgataaattatggtaaggaaattagattttttaaaatcctaaatacagtggctattactgggaagttggtaagaggagaagagaagatgagattagtgataaaattacattgatttgagattagctcttataaaaagatcactggttgcttagtagaaaatgatactttatctcaatatcaatcagatactgtgttaaaatattctgacagtttagacaggtagaggctgtgtgggggaaacaaaatagacaaatttgagatatttgggaggtaagactgacaaaacttgatagtaaattaaatttggggcatgagagagaagattaaaatatagtttacttgtctccatatttgagtcatttccttatgctactaaataatatcagcagtcattgcttcaacaaatctccttaacatattttgcttgagttctatgctcactgtgtatgattttcagctctctgttcataataaatcatatttcatttaatgcttcttcacttgtctgtgaatgttacttgctttctttaaaaattaaatgtcaaaagataactgaac

SEQ ID NO: 727 - DNA, 1863 bp, Homo Sapiens
tacagctgagggaggccgtgggagcctccctggactcatctctgcctctgtttctttattgattgttgcccagcaactctgatcttgttgctgttctgtttgggacccagacaatgcaagtggtggagggattttccttgtcaggtctttcaggctgaagtgtgggcacatttgattgtggtgaggggaacgcacagatgtattacaaaatcttagttgataaagcagtggaagggtttgagaggattgactccaattttgaaagaagttctactgtgggtaaaatgctatcagacagcatcatgtgttgcagagaaatctttcatggaaggaagagtccactgatgtggcaaacatcattgtcttattttaagaaattgccacaggcaccccaacgatgctgacttctgtcccagatgcagtcaccttcatgggggcggactccctgcttgtctaggcaatctcaaatggcaatttttgagtgaatggccccagcccacagctaacggcagcagcttgggcctctggccaggctggctgtgtgaccccgccaggccccggcccagctttctcactgacgtgtcaagaagggagagggtgagggtgtggggacttggggagggttggtggctgggcctaatcccactcctgtccccggatgacagtgccctagcagctcacggcagagtttctgggagccctggaagatgtcagcgcttgacctttgctggctgcgggggctcctactgctgtttgcggaagtccctaagtcagtggcaggagggtgagtaaaatgtcacccctgtgcaatgccacagtgctgaggatagtgctgagggcagtgctgaggacagtgttgaggctggtgcaatgccacagtgctgaagctggtagaatgtcacaaggttggggagaatgtggcagattccccaaacacacggaccagaagcatggtggccgcagaccatagcacaggtccctccgagggacagtgggactgcaccgggtgataacaagggctccattcccctacaaagaagtaatcaaatgctctgcctccatgtcggcaaagcaagcacttcccacccatgtcctccgtgaccaccaggaaggtgatggctccgaacagggcctccactcacgggttaccgaggtacctccacctgtgtcgtcagtgaccacaaggagtgatggctccgaacagggcctccactcacgggttaccgaggtacctccacctgtgtcgtcagtgaccacaaggagggtgatggctccgaacagggcctccactcacgggttaccgaggtacctccacctgtgtcgtcagtgaccacaaggagggtgatggctccgaacagggcctccactcatgggttaccgaggcacctgctgtcctttccagggttctgggacaaaacagcacatggacacttggatttaaattccagcaacaccatgatttcaggggctgttatttcagctcctgagcctgtgtttccttgtctgcagagtggggtgcacatggccaacctcacagagctgtgggctccatcaaggtggctgtcgctgtttccctctcagtgctcagcggcccccaggccacccctgcaaaattgctgcttcctcccaagaggtttgagcttggatcaaattcagaactccctggaaagggtggcatcaagaggccccctttccaggcatttgcattgattaaactctcgtgtgacctgtccatgactctagggagaggagcaacgggggtgatgaccgtgacaagctagagaccctcttggacagatggtcgttattccacttgctccaggcaccaccctgtgagtcacggcaggtgttggcatcccattt

SEQ ID NO: 728 - DNA, 1853 bp, Homo Sapiens
atgagagactggatggctgttacaaacccaggtctgtcttcacaaagcaaaactatctctaagtatagctcagaagcaaagatatcaccaccaagtttatacttatagcaagtgtcatgttcctcaatagttttatttaaaaatgtgcacattttttgttggtgccttctgcataaatgataatatttaacagagtatttatgtcttgatccagaattgactacttttggctttcctcagttatgtgaaggatccaaaggtaaagagatagaaataattaaatatggcagctcttttaaattatatgaatgagctactactacttcagtagaaggatcttgtagctcaggaaacacagaacctggaactgggaggtgacatggaccatctacagaactgctaaatgaaacttaagaaactggaaacctccaagagggaaatgattgagcttcaggaaagagacagttacaatgcaagaacaggaatttgaatcagctattgaaaaatgagaaggataaggtacagaaattacgaaatattattgtaagttgagctattcagtattatcatgatatgatatgaaaagagtgtgaatataacaaactgaaggaaagtctacatcaaccttttatgaaccaaaaagaattaaaaatagctttagacattttaaataatgtggggagagctgatggaaaaagaggcctctggaaaactggtaagacagaagtcaggaatttgatgaaatgtataaaattatcttgaatgattatgagtattgtcacaaacaattcctaatggaaaatgctgataatgaagaagtttcttcaccaaatggaaaaggatatgttttttcttctttctcctcaaaagaaacctagagaaagagaagatggtagtacaggaactgttatctcagatgttgaagaagatgctggggaaatgagcagagacagtatctgggaactttcctgtgaaactgtgagagaacagcctacaaacagcatcagaaaacagtggggaattttgaaaagtcatggagaaaaacttggtagccacgtttcaaaggtacacttagaaaatttaatgatgaagatttaatctcaaaacaagaccatgaacaagaagctgaaaaactcaaattagaaattcagaaatgtaaagaaatgattaaaactcagcagcaacttttacagcaacacctcactactgcttgtgatgatgataccactgcactattataagactgttatttggaagaaaaaggatgccacaaaaaatggcccctttttaaagagcaaggagcaaaaaaataattttcagagagaaagacgaagctttacagaagcagctattcacctaggtttggagagaaacatgtttgcaaaaaaaaaaaaaaaaaaaaaaaaagaaaagaaaaaaaagagccagttgattaaagcaacagcttttagatatgactaccattgaccaccagaactcaaaaaatgttaaacttttcagtgtcttctgaggaagttctgatcaggacaatcttacggcgcactccaggcaatggaaaggaaacctcagagtgtgcataatggtctccagtttgcatgtctaaacttactgaatgtcttcttgcttcaccttctactgaagatttcttttcagatgcattcctgtgtatctgaacatacttcaataaacgtactgaatataactcctgaataaattgaaccaaatcatgttgaaagagaatctacaaacgagaaatgaagcatgacagcaagacctgcatcataggaagattaccatattacatgctccctgacccacacaatttctcatggagaaaaagatgacttacctta

SEQ ID NO: 729 - DNA, 3043 bp, Homo Sapiens
gtgctcacacgcagctggcaatggcaagtcagtggatttaggataaaaccgagaataaggaactttacattgtcaatgatcaaacacctagtgcacccatggccgtgcgtccgcaggacaaagcagcctttggagccctggaacttaagatgtccagagatcagcagctctcggctcaggcccaggcagctggacagcacccagcgcctcctccaggtcctcctgggtcccctcctttctttcactttcagcccgggaatctctgtgaagtcctagctgataactaaggggttaatgaataatcacagtgatgagctctggaggagccatggcccagagcagctgtggcctcctttgattaaaccacagaagtccggaggatcaggcctcaaacctccaccacctgccagctggcacctgtgaaggaggtgggaccagcacccacctcacagtggctgcagggtcacctgagatggtgattgcaaagtgctgagccatcgggacacatatttccaagacctcctgagtgccggctggcccctggagcagagatgagacccctgtggggcctacagtccagttatgaaggcagggttcctgtgtaagccagcaggcccagttctggaaaggccaggatgtgggttcagaagctcaaggacaatggactcattctgactggagggatccaggaaggcttcgtggaggaagtggcatttgacattggcatcaaggatgaacaggaatagagagaggggactggtgtctgcgtgaaggatcgccaaagcgctgttctggggtgagggcgatcagcccctcctgcccctcctgaactatgaggctcgggagcctttggcagaaggtggctctgcacgccccaggtgcaagcttggagcttccttttctgcactccacagcaggaagaagggcagtgtgaactgctcaccactgtcttcctgggtttgcagctctgcgcctggcacagagacaggctcagtgacggttgaaggaatcggagaaataatgaaaagtgtgttcatcctgcaggcagcagagcctcgggttaaccgttaacgtcaggaaatgacagatccaacgctcctgcttggggcagcgtggaggccagcggaggaactgcaggagcctaaaggagatggcgcgcgggcctggctcaggagagcagccgtctgaaagatggcggcgaagggtgcgggaggagatgccccgggcaggggcttggcggggtctggcaccaaacttcccaaagcagctgcctctgtgaactgtgcctggcagggagggagccacaccgggagtgaccctagacgctggctccccaggggtgactggaggcagtgtctcccgcccatgtgggcctccggcttggggtccccagagctctgccctgctgctggctgcactgagagaggtggccttctgaatgggccctgtccccggggagcctctggtaaagagattcacctgcaccctcaaaacacgccatgcccattggaggctctgggtgcaggctgcccctcaaacagagaaaaaccacacgctgtttaagacccaaaccaaggagacagcccctcatgcccccttctatctccccttctgtccagggccccctgcctgctctggtccaccccgtcctgaccccctctgcctgttcatctgagggccgtgagccaaggcctgggcctggccaagggtcagggatcctgggacctgcttgagaccatgccccatacactccttcggccagaaggtcagccgtagagacaaacccccaccctgagcccgcagtgtcagcaacgccctgtcctcagtgccaggcagtgtcaggctgagacccgggccacctgatccaacgtccactccaagcaagccagagccaggtgctgccagcctgcccatgtgcacacgttagcagacaggtttcctggtgtggcacacacgtgttatgaccgcggctgctgcccccagcccagagtgcacttccgggtaatccagcaccctgaggcttcactgctctcctgagagttttctaagattaaatctccttcacaatgacagcctcctgtcacctgggccctggtgacaaagcctttggagaggcaaggacccagccggggcattcacagtgggcatgctatccaccctccgcccctgtcctggcccccacagtggagccgccaccttgggtaacaggggctgcctgaggtcctggagaaggaagaaccaggtggcccaccttcggtgcacagggaacagcagggacctgacggcagcccccgcacccctccctgggctgaagttcaggctgtctcatcccttgccaggagctcagggctgagctaggttggcaggggatgggttgagggtctgttgtccagcagattgcccgggccccacccaggccactcagaaaacacctgtgagagccccgcaggcatgcagggcactgtcgtgagcacaccagtggggacagacgtccaggcaggagggagcagccagacccccatcccgccagggtcaccaggtgagcaaggctggggaacaatggaggcggagccccgcgactgcccagctcactgcccccagtgtccaggctgtggtgcaggcgtggggacccaggtgtgttcaggggtctccttcagggaaggagaccaagctgggagtctggggaggctgaggtgtgaggtgacagcaggtaaagagtgagccacaatcagcattttcacatgaaaggaaactacaggcctgggcgcagtggctcacgcctgtaatcccggcactgtgggaggctgaggtgggaggatcacctgaggtcgggagttcgagaccagcctgaccaacatggagaaaccccatttctactaaaaaaaatacaaaattagctgggcatggtggcgcatgcctgtaatcctagctattcgggaggctgagacaggagaatcacttgaacccgggaggcggaggttatggagagccaagatcgcaccactgcaccccagcctgggcaacaagagtaaaactccgtctc

SEQ ID NO: 730 - DNA, 2035 bp, Homo Sapiens
gccttcacgatcgtgatggcccgctggtcccacttctctgtctcaaactggctttttctcaatcctttgactccgccgggctttgtcacccccatgacctggtgttgggtctgatcaccccaacgttcctggctgctcaatgtggggtgacaaagaccccggtgaaggaacgctagagcgtgtgaaagcagaggacgcatcatcagaggacacctgaggatgtctaaaagaagctcagcaggaaagctgagtgctgggaagaaccagggtagcaatgggacaaagtgaaagcagacattctgcttatttaaatttcttaaggcgtttattatgaagaggggggagtgaaagttagtgctcagaatttatcactcttcagtgcagtaaagcagttttgcccatggttcccggaacaagggactatggagttggatgaatgggagagaattggcagagatttttaaaaaaacatataaaggtggagcaaatattccagtctcggtttggtcaatgtgggcactaataaaagcagctcttgagccatttcaaacagatcatgaggcagattcagatgaggaagaggagggcgagtgtaaaaaactaacttcagattctgaatgtgaggaacagaaaccggaggaaatcaaagaaagggaaaccgaaaaaggtatgttttactagcccctcagctccacctgctgaattaagtgaatggccacctcctctctctccccttagtgggcgagaaaatgaattagctacaaaacttaccgctcctgtagttgcaacattaaaacctggagcaattggtagtactaagacccagtggaatctgaggcttgtttatttagagagcacctcaataaactgaggcatatccggcacagccagtgcccttacaaacggcaacaattgtctcccaccgcggcgggcagtgctgccgtggacctttgcagcacagttctcatttccctgcttcctgggagccactggagagggtccccacgggagttgggggacccttgccctcaggaaccgtcggtctattacttgaaagatctagaggtggcactgtgcatacggaaatgattggttctgattataccagagaaattcaattagttattagttcctcaactctgtggtctgcttccccaggaaaaagaattgctcagttgttgacataaagctgggaagcagcacagtgagaagaacaggaggctttggtagtactaatccaacaggaaaggctgtattttgggttaatcaagtgtctgacaaaagacctatttgtacagtagacctgctgttggatgcttacagactgacacacaggcctggttggcagtagtctccggaaaaaataaatcatgcgctgctttgcgtagggcaagtcaagtcatcttgaagcttcagtttcatgtttaacctgcctctgctggagaaaaacagatttaataagcacacaggcatgatatgggctgaatgtgttcattgtggtgtttgtggcctttatgatgggaatgttcaacctctactactacattggtgcaaaacaaagtgaagccttcacaacagagttttaagacactgctctaggctatatttggactttctgaagtgaaatcagtggtcatcaactataaccacaaattcattgaaaacattggttatgttatttatggagcctataatgttacaatggtcattgttttgctaagtatgttaactgccatgatcaacaattcattccagggaattgaggatgatgctgatgtggagtggaaatctgcaagggccaaactctggtttccctgctttggggaggggagagcacttcctgttcccttcaatctggtgccaggtctggggtccctgttttgtctcttgctgaagcataaagggtggatttttcagctctacccagggtcataaaaaaggtttccaagaaagatgcagagataagtcagtaagtagagataagtaagtggagacaagaaagtagagacaaatagagacagagacaaatagagac

SEQ ID NO: 731 - DNA, 2414 bp, Homo Sapiens
cttttcgcatatggagcagcaatcagcttacaactaaatcacatctgagcacaagctgtctccacaaagccaaccaaagaggcaacattcacaggctgacaaagcatccctaaagcaggaaagaaaagaagcccctgaggctgctgcccggagaaggaaaaggctttcaacattcataccagtctgttggggcattgtgcagaccacagagggagagtaactgatggaatactctctgaagttcacacttgggcgaagctgcatgtttaacatcaggagtgggaggaaagtttcactttccccaaccctccaatgccagaatccatcctctctgtgtgaactggaacgaggtgcactcagtcacgtaggatggtgactaatcaactcattacactttagagtaaatgattttcaataaattgcctcatccaaacatttctatcttaaaccattcatctctgctgctcaaagtttaatctgtttctaaaggaacttagacatctgcaagtagttgaggaaaacatttctgaaaataagaataatgtcattcatccaacacattttattataaagtttaccgttacagaatgaaatttgcccccttgaaaattcatatgctgaggccctgacccacaatgtgactccatttacagatagggtctttaaagaagtaattaaggttaaatgaggctataacagcgggcccctaatttgatagggctggtgtccttataagaagagaaaaagacaagagctcactcacttctgggcttacgtgctctctctctgagaacacacagaggaaaggctatgtggggacaccaagagaagacagctgtctgcaatccaagaggagaggccccaccagaaactgaccctgctggcacctagatcttggcatgtccagaactgtgagaaatttgtcttgtttaaaccacccagtccatggcattttattgtggtgccaggcagactaatacacttccttacctatttgtcaagcactgtgttagacagtagggatacaaaatcgagtaaagcagagcccttatttgctcagaattaatggcggtgaggaagatagagaagaggaggtgtgatcagtggcactactgattcatttgtctagcgtggtttaggcagtaccagaagggatggggcagacggtacacttctataaagtaagtcatgtttatctgtaacaattttttttttctgcttttttgagagggagtctctctcttgtcacccaggctggagtggagtggcaaaatctcggctcactgcagcctcctcctcccgggttcaagcaattctcctgcctcagcctcctgagtagctgttattacagatgcccgccaccatgcccagctaattcttgtatttttagtagagacaggatttcaccacgtaggccaggctagtctcaaactcctgacctcaggtgatccacccacctcggcctcccaaagtgctgggattacaggtgtgagccatcgtgctcggcacaaattttaaatattgtagaaacaatcatagtagactgaggctgggttggttaggcttcttttataagatagtgatttattttttaaaagaaacttttaaaagaaagcctcccacttagagataattagaatagcaaagcatttaaagaactagaaagattcttgggtagtctgggttagctgtaacacacaataagaccctcagtctttcactctgcccttcacactctccccaggaatccttctagtaatcttaactccctcatgataccactatctaccagttgctccagcaaaaaatccaacagtcaaactttatttctctctgtatttcattttgtacatctatgtcagcaacagatcccactgcttctaattccaaaatatatcataaaccgaactatctgtctccactgccacctcctcagcccaactacaatctgctctcagctagatttcattaaactctccaatgtctccaagctttcccaacaaatcgttctccctacaagagtgaaattaatcatttttaaaggatggacctctgtttacccttaaaacaaatgattatataatactgaatacacatatttaagaaaaatagagcagacatctatatagctactacacatttaaatctccttatgtgtctcttcccaattaactatgctgttcatcatcttccaactaacctgtacttgatatttattttactaacatacttcttttggttgtctaaatctatctctaagcaatatatattatttttgcatttttaaagtttggtgtaaatgatattttattgtatttattctttggcaatttgtttttatctcattattatgcttgtgacatttattctcgttcatttttgcttctgtataatattccacgttctgaataaac

SEQ ID NO: 732 - DNA, 1292 bp, Homo Sapiens
tgggcgacagagcgggactctgtctcaaaaaagaaaaaagaagtgctcactccccagcctcaggagtggccatgtcaacccggggggcacagccacacaggcaagggcagccctgggttggcctcagcgtcatgcggcattgacactgggtggacatgcactggccggccacaggcctactatggcgggatgtggggattccaggtgaggggcatggatggtggacaagatagagagaggtttgggggttcctgtcagcaggccttgttgttgggcttgacatctgcagatcttcctttcaactcggacccactccagaccttgagatccccagggatcatgcagagtgaaagtgagcttgcgtcacccacctctccagtggactagagctcctcaggactaagatattctggcttcctccaggggaggaggtaggagaaaaatgaataagagggaaatgggaaggaagagaaggaagcaaactcccagaagaagtttgcatccaacggcaaaagaggcaacaaaaaattaccatcaatagctgagccaaagtagatctagttccttctgcatcccaagcatcacgctaggtaggtactctcacaaaacacggctcattttttttaaggtggattttattttactcatttaaacagctttattgaggtataaaccccacccacagagagaatatttctatcctcgcttttcaaataaaaccatgaggaacagagaagttgagcaacttccccaccattgcaaaggttttagataacggggcagagatttggtgcagaactgtgaagtctctgaactcccctcaccccactcacaataatgctcctgttacaacaaagaacgaagaaaacgagcgttcctgggatgaatccatattgctcctgtggagtaaaccatgactaggaatgcaagcggggctgaggcacatatctgcctctctctgatctaacccttgtcaaacaatgtgatttcctttccacaccagagtggagatcctttctctgccctatggctgcacacctgcagcctttgtccataatttgtacactttacttcctgaaaataccggcctgaaatagcaaagataagatggtgctccatctgggctctgtgtccatggaaatgtcggtttcctggctgacttcaccctgtccctgtagcccttgtctgtcattcctgttgggggccatgccctgctttggagtggtgtgtgtccctgttggcatggcttcctgagagctgtcactgaacctgggaatcagaagtaaacccaa

SEQ ID NO: 733 - DNA, 2613 bp, Homo Sapiens
ccagccagatgctgtgaagtctccataaatctgtcagccgtcccagtgccgcgggcagtcacctgcggcgcccccttcccggcgctagagcggcccgcggagagacgcggagaagcaacgggaatctagcccggcagactgtacccgagggctgccgaagtcagacccaagcactacaggttgtgcggaacgcgaggacccctccctgtatccccaacctggaccgacccccggaagcctgctcctccgggtctacagggatgaaggtcagagtgtcaaattgcagattttggatcctcaataatgggccgctgtatttaacctcttcaacttcttttctccacttataagaaggaacaaaataaaatgttttgtggaagtttatattgaaatgaggtcaggtaaactaatgactgcttggtattttatgacaagttttataaccttggagttgccataactttcaaacgatcatcaataaagttttattgcaaaagggtcgccatgtgtctgaatgcttttgcacatagtaaagctatgctgccccattgtcgtagctcaccagccccttttcaccccagccataaagtcctcttcttttttattggaggttgaaaagtcctcgggtctgctctcctccatcaagttggcaatgtgggaacaacacagaaattaaactacatgattaaatgatcgtacacaaccaaatcttcaagaatatgtaataagactgctttttaataattataaatttggattttaaatgggttccatttaataaaataaatgacagtgggcggcgggtgggaaaggaggaagtcagatgagagtttcctccagaaacttgtgtttgaatgttagataagacctatcagtctacccgatatacccagagggctgccattaaataattaggtgcttagggaccgataatggtctcaagacaaaacaacgaattgctaaagactctttgagctgacccgaggatcttaaagatttaagaggcctcgcattgcgtcctaacttgaattttcccacggagggaagggttgggctacagctcatgcttgcccgattgctgcctaacacattccctaaacgctccctaaagccaaaccaagaacttcaagtgtccacttcacggcatcagctgtcaggttcaggttcgggtccgcctactccttgtccactgccgaatgctatgtggaaatgaagccgagaataatgtcctgcgatttagatgaagagaacagtaagaaaggtagtatgaaacgaagcttctactgacgcgcccttcagacaggtattccgcaggcgagggttgtgacccagggagagagtgcgggagtgctagcagagcggcgggagcggaaggagaggctggacgaaagttggaaaatcatcccatctcgggacttgagtgcgagagcccgccccggagtcggcaagtctccagggttagaaggccctagctccaaagttttttgtcccggctcaggcaggtcccccacctctaaccttccccgatttgcctggttgctctcggggaagggactggtaaataccgccctctcccggatttcctgaaactctcaccagcgcgctgaacccgctccttcccacgttcggcgccccgcactctgcgtctgcgcccactgcgcgtcaccttccctccggccgagaccactagagccctagatccgggatctgcggagggaacaggacctgagcccctgctggaccctgcaacttggctgcggagagcgcgcagccacaagcgccgttcctcacttgagggcttcgcgagagctggctcagccccgcgggtccccgccagtcctcgccagccctcgccagccccggtcggccccacgctaagtccgcagcaggcgggaaaccccgcaggccttcccggactcacgaactgcctactcccacccctaaagagctcagacctgaaggtgctcttatggtgcgtggccgcaaccccggagtggaatgggtggggggcctccatggcgaaggagacgccgtgggcgaatcggctcccagctcgcccctcatgtcctacaggtcactagccgagtccctaccccgggcgctcccatgaggcaccaagagcagccacggcccagggaagggcctgggtcttcactgctggagcgggccccagtcgagggcgcgcaggtgtcggggtccccagcaacctccgtatgcgcggaaagccgtaaacggggttctgaggccggcgccaggcacaaggatcaccccgcgccacgggccacggctcagagcgcccacgaagcccggctgccaggtccaggccgcggccgggcgggacccactcgctccccacggtgctggcgcggcgggagtcgggctggttaaggcgggaggccggcactgccacgggctgtggcgccccctcccgaagacacctcgccggaagtgcggctcccgcctggcaggcgctgagactcctcggctgtagcgcgaaggccccggtccgcgcaacttcccataataacgccgcgaaatgcctccagaaatgcctgtgtggtatggtgtctgagccaatggtcggcattcgtcttccccaagtgcggaaaagag

SEQ ID NO: 734 - DNA, 3348 bp, Homo Sapiens
actacagcctcagtgcatggcggtgggcgcttccagtaactcaggggtgggacttttttcttgctcaggggatgaggccgagcccacaggcttagaaagaaggaacttgagtccgggcacctgtcatcccagcgcttagggaggccgaggcgggtggatcacctgaggtcaggagttcgagaccagcctggccaatatggcgaaacccccgtctctactaaaaatacaaaaattagccgagcatggtggcatgcacttccagctacttggaaggctgaggcgggagaatggcttgaacctgggaggcgagggttgcagtgagctgagatcgcaccactgcactccagcctgggtgacagagcgagacttcgtctcaaaaaaaaagaagaagaaagaaggaagctgaggttcagacaggctaagtccctactgcaggctgcggaatctaaaaaggtaggtgccagggtttgcaacccacacttttattttggtctcaggtagctgatgtcattccagtctatggcaaagaaggtggcaaatccattaacatagatgaagaatttcattttactttttagttttatttatttatttatttttattatgtatcatgcttttaatacaaactttaaaaaatctggaacaatagaaactgtacagatttgatcaatctttttgttttgtttttaaactaaaatctctaaacacaccaatgtcctattccaaaatattgcacaacattctgaatacaaaacccttgattgtattcctccttcactgaagaaaaaacttcatgaccctgctccccgggctcctctccaggcttgcgtcaatgcccccttcccatccctagggagaaaactagagaatctataactcactgcattgagaaaaagacatcattctggactaacagtttccattcttcagaagataatccaccttttgatttgttcctgggaaacagggatagatagaggatggggaaaggggagaaaaggttttatttctcctcttttttttttaaagtttgtttttcctgaaaaaatatgtttctctcatctttttaagaaaaaatcttgaaaagaaaaaaattgtttttacgttagaaatatacatatattatatatacctcttacattttacaaatgtagcaaattattcaatacaaacggacaccaaaaaatgtaaaaaataaaaaaaagttttcctaagaaccaggtaaattagtgcagatttctgtttttgttttcttaaaaaaaataaaattgaagcaaaagtgcctagatttgagacaagacagactgaactgggcccaagagcccagcactggagtcatgctcctgaacacacatttttcttcgtatttcaaaagacacaaaggggttggtctccccccctctccctacatgtgagaaacaagcagacctggtgtgggtgggtgcctgtgtgtgtggatgggaggagggatagaaggggatgtaaggcagcatccaacctttcccagagagaagctatctgctgggcctgtcacctgtgtgggagccgaggatgagggaaagggtggcccagactgggctggcccctgagaagtctaggggaacagatggtgctgggctgagaagccaggacattgcctgccgggggaggtagagctggtgcctactgcagggagaggaggctggcagtgccggcctgggctggacccactgccatagcagttgcctacttggggtccctgggtaggatggagtgggtggggtgccaggggctttggtgctttctggtgatgggaccctgatgccaagtgcccactttgcaaagatgaaaaagttcatgaccctgctcccttggctcctgtccatgcttgcctggcctcctggggttggaggaacaagctctctcctggcagaggcaggagagagttttattttttagaaacagtttcgctttgttgcacaggctggagtgcagtggtacaatcacggctcactgcatcctcgacctccccaactctagtgatcctcccatcttagcctcctgagtagctgagattgcaggcatgtgccaccacactggctaacttttttttaacttttattttttgtagagatgaggtgtcgctatgttgccctggctagtcttgaactccaatccttccacctcggccttaaataattttaatagttgacatgcacatggcatttactattggccggcattattttaaggtgcctgctctgaaggaattctgttagccttcctaaattattcccttggccattggaaacataggcatgagatcatttttagataattggaaaagcagagaaatctgtgaagatagaatgggaaaaaaaatgcatttcactaaaccaacatgccattgattgtgagattccacattactttatgtagccccacggctgcccttaaaccatgacacatgctttatttacagttcatattttacttattcgtagacctcaagaggcattctgtgcttccctcttccttctggaagcttcatgagaagggacattttcctcaaaggatggacaacagaaacaactcaaatattcatttcctttaaatatggtttttaagacaattttctttagaaagccacatttacctgttgggggttgatttatgctcacccccctcccaaatatatgttggaatgctaaccccctattcctcagaatgtgactttatttggagacaggttctttacagaggtaataaagttaaaatgagtaaatagggtgggccataacccaaaatgacagctgtccttataaaaagggtgcatttgcacgcagagacacgcatagagagaacatgatatgtagaggcacagggagaaggccgccatctgcaaaccagggagagaggcctggagcaaattcttcttcatggctcttagaaggaaccatccctgcctacaccctgatttcagatttccagcctccagaagcgtgaggcgataaatgtctgttgctgcagccacaggttggcggtgctttgctgcagtagccttagcacctgatagatggtctctttacatgtcaagcacattgcagcgcacatttgacacacagggagatggaagctcctggaggataagtgttttgtctgtgattttgaaggttgcaagtggaggaactgggattcgaacccctctctgtgtgatgcctatgcctcctctgtgttaacatttatttttacttatttttattttttagtttttgtagagatgagggtctcactatattgcccaggctggtcttgaactcctgggcccaaacgatcctcctgccttggcctcctggtcttgggattaca

SEQ ID NO: 735 - DNA, 12765 bp, Homo Sapiens
ctcttgaatacctcatcaacaccgcaggtgacccggagcccgctgctccgctcggccccgccccgggcagctatttggcacatttcaattagcgtaacgggtgcctggtaaacagccgaggccggctgcgggcacctgcaatccccgacccccgacgccctccccgagaccctggagacgcggctccgcccccaccggtaattaggagattttcaaggcctatgtccccaaagcccagcccagctggagagatcagccctgcggtcctgccgcgcactccaccgccagcctctcgggagtcaagggatccgccttcagggtgaattggggttccaccatgtcaccctcatggagctttcgttagccttgtttgggatacaaaggggtaagtgtcccctcattttagagaaagatcaagagccagtgaacaggatttcccagccagggacatggagcagggcacctgcagatggtccacgtgctcttggctgatggcagcccacctccgggaggggcctgtgcacctttctcccaggaggagggaaggacccaatcattatccagagtcaacggtcctccccatgctttccggctgtaccctcatcctcaggacgaacctccgcacctcctcccatcatctcaggccccatctgcaaagttgggatcagagagaggcccagactgcgctggacaactgagccagttttcatttcaaatcgaagtttaaaagatgccacttttaattatgcttgagtgcagtgtaccctgaggccttttgtggtaaatggctctcaataatcccagtttattcattaattattattaattattttcttaagtagtggcaaggggacgcagggccccgctcagaccacaagtcgcacatcgactgtcaaatcctcgatgagcaggctctgaagagttgcctgtgccggctgcaatctggctcgcctgggcccgggctggggtgccaggagcactctggactgaggcggggcttccagagcgtggggcagggctgggggaaaggagggcctggaggagccacaggccacaccggacaaaaacaccttccaccagggtggcacttcaccttcgggaagctccttcactggataatgaagacttttgtcttcagcaaagcgaggaagaaaagaattaccattaccaccagccaaggcacctgacacatgtggtcagtggtgaactggtaaactcgttctccagaaacaaaacaatcatctcaatcatctaacatttctttcctcttttttttttttttttttgatacaggatcttactctgtcacccaggctggagtgcagtggcgcaatcttggctcactgcagcctcaaccttccaggctcaagtgatcttcccacctcagcctcttaagtacctgggactacaggcgcacaccaccatacctgcctaatttttgtattttttgtagagatggggtttcgccatgttgcccaagctggtctcaaactcctgagctcaagtgatcctcccacctcggtcttgaggcttgagccactgcacctggcctaccatttcattatttatgattctataatattccactgtaggggcatacaggtcccttaacttctcagttccttactactgggccatttcccacttttcattattctaaacaaatttgatgaacaggcttttgcataggtatctacccataccctcattcacttacctaggtgacatttctaaaggtgaaattaactgatcaaaggacgtgtgtttttaaggctttgatgcacattacttaactttaactaaactcaggaaaaacggtgataaattataccccaaggccagcacttgggaagctgagatgggtggatcacttgaggtcaggagttggagaccagcctggccaacatggtaaaaccccatctccactaaaaatacaaaaattaatgggtgtgttggcatgtgtctgtaatcccagctactagggaggctgaggcaagggaatcgcttgaacccagaaggcggaggctgcagtgagccaagatcacagcactgcattccatcctgggcaatagagtgagactcggtctcaaaaaaaaaaaaaaaaaaatacacacacacacacacacacaccccaaggatagatatttataggggatcacactgatctttatatacgaggtctagaacaaggcaaaatgcaaataagaaaaagtcctgaattctagtacttgccagtttccatggtgtaatactcccatcctggccagtatggagatactaacaatttaacaactggcttgcaaaattcctgaaaatctaacaaccgtctctgggagctcatgggagctgaccctggcaccttagtgtgtgtgatgagatttcctccttctctgaaaggaggtcatggtaatttcatctgtcaacttgactgggccatggggtgctaaggtgctggtcaaacattctgggtgtttctctgagagtgtttctggatgagattaacatttgaaggcttggtgcagtggctcatgcctgtaatcccagcactttgggaggccaaggcggccagatcgcttgagctgaggagttcgagaccagcctgggcaacacgacaaaccccatctctactaaaaatacaacaattagctgggcgtggaggcgcatacctgtagtcccagctacctgggaggctgaggtgggaggatcacttgagcctaggaagttgaggctgcagtaagccgtgctcacaccagtgcactccagcctgggcaacagagtgagaccctgtctcaaaaaaaaaaaaaaagaagcgaaagagggaggcaggagagtcagcatcagaggaatgagatacaggaaggagtcgactggtcattgctggctctaaagatgcaggaaggggtcgagaaccagggagtgcaggcagcctctagaaaacagaagaggaagaaaatggattctcccacagagcctccaggaggcaagcaggcagccctgccgacacattgattttagcccagtgagggccgttccggacttctgatgttcaggactaagatatattgtgttattttatgccactaaatttgtggccatttgtttccaagacggtggtattgtccccatttaaccaggtgatggaacaaaatttcagagacataaactctgtgggtcacagctagtgatgggggcccaaaacagggtttgaccccagggctgtctgactccatggcccacgttctttgttgtatcccagaagagaagccactgtttacacgaaagcacctctgggaaggttaacaacttcgtcctgtgtcaggcacgggaactgcgtagcctttcttcatgaaacaccagaaaataaaagaaaccggccggacacggtggctctgtcaccctaggactttgggaggccaaggcgggcagatcagttgaggtcaggagtgtgagatcagcatggacaacatggcaaaaccctgtctctactaaaaatacaaaaaaaaaaaaatagccaggagtggtggtgggtgcctgtaaccccagctacgcgacaggctgaggcaggagaattgcttgaacccaggaggtggaggttgcagtgatccaggatcgcgccactgccctccagcctgggtgacagagcacaagactcagtcaagagaagagaagaaaagcggaggggaggagagggggagaagaagagaaaggaaagggaagaagagaaaggaaggaaaggaaaggaaaggaacaaccacaagcatccacatccagcttaaggcagagatgagtttgcaggaaggaggggaagcccaagggccggagtgaaccaggagctgaaaaccagacggtggctgcgtgagtgtggccagcgcaggccgaggcttcctggtcctggggtccagggcttggactctgactcctccacggagatgagaggtgtggcctgggggatggacatgcagaatcgagacccctgcataaagccaggccccttcagttctgcggtctccgtggaaggacagagcaaaaacacccatccccagcacagggagattgggagagggtctgtcactatgggagaaggaagatcagagatattggcagagcggtctccagaactgattaaaatcaggcaccagcagattcaggaagcccacttgagtcctcagcaggccccagccctggacacaggggctcaggacacagccactactagacaggagactgtaccctccgggcctagtgccttaccaagcactgctcctgggagaatgtttgctgaacggatggtgatggggagagggaaaagagaggggaaagtgagggtgtctaagtccagcttgagacaaggccgggggattcatagtctccacccaccctctgccttcagaggtccaaggatggggtgggcaccagcatggggctgggggagccatgggggccaggggtatctgctgtgggctcaaggagccctcccagggctcagaccccagcctgaaactctcccagcactccaaaagccaaatcccacccagctctgggctgcttcatggggccccagactggagaagacaccccacgaagggtctctaaggaagaggcgctggtggtcaggcctgggcagctgtgggagctgagagtttaatggggagaacgtgctctgttggcttcacgctccaacatcagggggaaccagctgcaccgtttccccagaatcacggtctcttgagcccaatattcaaatatatgcagacgtcggagcctggactatttttagctgagactcagagggagatgatctcaggctgactcggagagtggcccagtcccagaggagcgcagaatcaacctgaaaagtcaggcttggggaccacccccttctcctgctgtaagcgcctggattctgcaccccaggtgccctgaaggtctgtgttgtgggtgtttatttggggcggagggactggtctgcatccctggggagctgtgttctctttccttcgatgccttttttcagcaaacactttgcttttctgcgaaaagacaaagcgggctgcatgctggagccagcggcctggctagggggccgtttacctcccgactcgggatgcgtggctcagcctcttattatcttgaaaggcagcagaagtctgaccccttctgtgtgagcttcccatggctgttatagtcacttaccaccggctgtggcttaaaaccgcgggagcgtatttcctcacagttctagaggccagaagtccagcatcagggtgccagcagggccgtattccctctgaaggcgccagagaagggtccatctttgccctcccagcttccggcggtcaccagcaggccttagtgtttgctggcgcagctgcatggctctgatctctgcctctgtcttcacagggatttcttccctgtgtgtccccgggtcctcttctgataaggacaccagtcattggacttaaggcctctgctaatccagtctggcctcatctcaaattgaagaacatctgcacacaccctatttccaagtaagatcctattcacaggcaccaggggtgccttcaatgcatcttttggggggaacacaattcaacccacagcatcttctgtgttgttctgcccaaggacagccaccccccagcagccgcggtgagaagttcccccaggtttggggtttccaatcttgggtggcggcaggctgggagccagggaccgcttgagccttactgtgctctcctgctaggaggggcggcagctccttgcccctggagacagcgcggctccccagagcagctgagtgtcttgcagtcatcaacagccacctcatctcagaggcagcacctggaatcttacctgcctcacctcctttagtcctcaaaacacctgtgtcccaggattatgtcccttattctacagaggaggaagctgaagtgcaaactaagaggaagttccgaagcagcaggttggggtgccaggtgccagcctggtgaggagctcggggctctcgcgaggaccgtgacggggctttcaccccatcttcccttctgagtcgggcttgttgggatggggtggtggggtctgcacctgcacagccaaggaggagcagggcagcctcaccctagcacagtcctgaaaagagggccccgccccctttaagggaatacgtgattcccttttagagagtgctaggccgatacttggaggagccagtgtggtcgggcagaaaggggtggacaaacctaaaccctacggacctcttttttgagaccccaaactgcctgggctcttgcctcccagaagtcagatcttccccaggggagggtgtgggaaggtggggttagggaacatacagggtctttgggagccttctaagtcagccaaggcagctggggcagctgcagggccagagcacagggaaggcaggtccccaggtctagctgctcggcctccagccccgccaggcccagctaagagggtgctttggctgccaagagaagaacccagggtggggactgcctcctggacctccacaggcagctggcctcctacagtcctgctgggacctgggaccccgtcctctctgctgcccttcagcttccctggctgtgagggacagaacttgttaccagcctcccactcatgttatttctcctgcccttgaacttcaggactgtcttggagccagccgaggcctgtttgcatcctttgcccccaggtccagctggatcccccaccttttcctccactggattcagcctagtgggccctgggctgcaagagaagttgcttcagcccaggggctggggctggaggccaaggcttcaaatgaggcctccccaagttggtactcaacctcctctccctccttggagggcaaagccatgagggctgcagagaggagctagccaggtatgatgggtaagtgcagtggttcacagtagaaccacactagacacatagaggagtgctttatgaaatgctgatgcccagctgggtgcggtggctcacgcctgtaatcccagcacttggggaggccgaggtgggaggatcacttgagcctaggagtttaagacaagtctgggcaacatagtgagacgcccccccacccccatctctataaaaaaaattagccaggtttggtgacgcatgcctgtggtcccagctactcaggaagctgaggtgggaagattgcttgagcccagaagtttgagggctccagcctgggtgacagagtgagaccctgactctaaaaataggaaattttttttttttgagatggagcctcaacctccacctcctgggctcaagcgattctcctgcctcagcctgccgagtagctgggattataggcgcgcaccaccatgcccagctaatttttgtatttttagtacagacggggtttcaccatgttggccaggctggtctcgaacccctgatttcaaatgatctgcctacgtcggcctcccaaagttctgggattacaggcatgagccgccctgcctagatattttggtttttggtttaattggctcaggtgagtccatgggctgaggggcttcatcacacctgtttcctcacctgtgagtggggaggggtggtcacctggcagggcggtggtgaggccggcccgtgcctgcccttccctccactgttcagagttgggccagggctgaaggaggcgtggccagcttcagaggaaggtgtgggagccgcagctctgcctggcactgacatctgggctgcaaattctttctaattctcaacttctcccccactactgccagccagccccttcagcttcatttaaaagttcagacaggattcaaaagtaggttgatatataaagacctattaaaactcaatactaagaaaacaactcaattaaaaaatgggcaaaagacctgaacagacacttcgccaaagacgatacacagatggcaaatatatatgtcacgtcatatgtcatcagggaaatgcaaattaaaacagcaatgagataccactgcacatctatcagaatggcccaaatccaaaacactgacaaccccaaatgctggtgaggctgtggagcaacaggaattctcattcagggctggtaatacaaaatgctatagccacttgggaagacagcttggcagtttcttacaaagctaaacatacttttaccatacgatccagcaatcgtgttccttggcatttacccgaattagttgttggaaattgtgtccaggagcttctggacagctgaacatgtggaggttcctgggaggtggccgtccagggagggcacggaagttccgtgtcctccgcccccttcatacctcaccctacgcatctcttcatctctactctttgtaaaatcctttacaataaaccggtaaacctaagtatggccatgtgactaagctctggccaatggagcacaatcagaagcagcatgagctgactccccctctcctttttctctttcattggatggaatgaggccttagaggggacccatcttggaccggatgaggacaacagtccagaaatgctggaagaccaagctgcatctttggcagattatattttccaaagatagaggcaacactatatcccattccacgagcacttcttctgctgtgactttgacacccctcccattgaggggtggcatctatgtcccctcctcatgagctgcagcaggaggagctttgtgactctcttgaccaatagagtatgccagcattgacagcatgtggcttccaaggctagttcaaaaaaatgcctttcacttccaccttattctcctgggatgttcactcttggaacccagccaccatgctgcacggaagcacaagagtccttggaaaggcctacatggatgggaaccatggcccccagcccaaatcccctgctgagctccccagccgacagcaccaacttgccagccacatgagtgagctgtcctggaagtgattctccagccttggggcaagccacctcagctgatgccatgtgaagcagagacaaattacctccaccaggccctgcccaaattgcagatctgtgagcaaaacaaatgactgtgactgttataagcagaaaagaaaatagaaaagaaaatggattccactcaaaaacttggaagtgaacatttatagcagctttattcagaactgccaaaacttggaggcaaccaagatgtccttcagtaggtgaatttgtaaacaaactgtgatccatccagacaatggaatattattcagtgctaaatggaaatgaggcaccgggccacgagaagatgcagaggaatgttagatgcatgttacgaggtactagggggaaaggagccaatctgagaaggctacaaactgtagggctccaactacctgatgatctggaaaaggtgagactacggagatggtcggaagatcatggttttccagggttaggaggaggcagagatgtacaggggtagcacagaggatttttagggcaatggaaccactctgtatggtgccataatagtggatacatctcattaaagatttgtcaaaacacgtagaatacacggcaccaggagtgagccctaatgtgaactgtgtttggttgatgatacgtcagtgtaggctcatagattggaacacatggaccactctggtaggggatgtggatggtgggggtggcctgtgtatgtgggggaggtggcatatgggaaatctactttccacccaactttgctgtgaacataaaactgctcaaaaaaatagtctttttttttttttttggagacagggcctcactctcactcaggctagagggcggtggtgcggcatgatcacagctcactgcagcctggacctcccgggctcaagtgatcaagcgatcctcccacctcagtctcccaagtagctgagaccaccggcacttgccacactagctaatttttaaataatttttgtaggccgggcgccctgggtcgtgcctgtaatcctagcactgggaggccgaggtgggtggatcacctaaggtcaggagtttgaaaccagtctggttaacatggcgaaaccctgtctctactaaaaatacaaaaattagctgggcgtggtagcaggtgcctgtaatcccagtaatcccagctactcgggaggctgaggcaggagaattgcttgaacctgggaggcgggggttgcagtgagccaagatcacaccactgtactccagcctggatgacagactccatctcaaaaaaataaaaataataacaatttttgtagagatgggttcttgccatgttgcttgaactcctgggcttaagtgatccttctacctcagattcttccaccttggcctccaaaaacgctgagacaacaggcgtgaaccaccgcacctggccttttttttcttttttcccctaactaggctcagttcctaaaagaaggccttggtcaggtttctgagccctacccccctcctgctggacaagatcatggaaaatgcctggctcagctattcttttctcagcctcttttaagcagcatagcagagagggacagaggtagagacagagagggactgagatctgggctcttcctccagctgtacgatatggaccaggcccctgttctcttcgggcctccatctgtaaaatgaggggacaggaggaattctgatggcctgtggctttgatctctgtgagcagatttggttgtatgaggtctctcccctggcattacatgctggaacagaagaaaatggccatagtcactgttaattaaaaactggtaccaagttattggtactctcacgtttgaaatacctactagtacctgcttggtctagaccagctgttctcaaagtatgggccctggccccctgtagtagtagcagcagcacccagaggttttttctgtttttgtttttgtttagagagatgaggtctgtgttacccaggctggtctctaactcaagcatcggcctcccaagtgctgggattacaggtgtgagccaccatgcctggcctttttctttctttttcttttttctttttttttttttttgagacaaggtcttgctctttgcccaagctacagtgcagtggcacaatcatggttcactgcagcctcaaactcctaggctcaaaccatcctcccacctcagcctcccgagtagctgggaacacaggcgcatgccacaaaccttggcctttttttttttttttttgtagaaacgaggtctcattacgttgcccaagctcgtctcagactcctgggctcaagcaagcctcccgcccacctggagcttattaaagactcaaatcccagggcccaaccccagatctgctgaatcagaaactccgcaggtgggggccagcaacatgtgtttcagtaagctcaggaatcaggtgattctgatgcatgccaaaattttagaaccactggcctggaacagggtgtgtgaagcttggcgctgctgatgctccaggccagatcatcctacgtggtatggctgtcctgtgcactggaggatgctgccagcatccttggactctaccccactggaggccaatagcatgccacccctgtctcaagtcacaacaatccaaaacagtgccagctgtcctccagggaacaaaactgccccagtggagaacccttggtgggaaggaaggccctgattgtgcagtgactcaaatacaggatcacataaaacctggagcgaaggcctggcgcagtggctcatgcctgtaatcccagcacttttggtggccgaggtgagtggatcacctgacgtccggagtttgagaccagcctggctaacatggtgaaaccccgtctctactaaaaatacaaaaagtagccgggtgtggtggcacacgcctgtagtcccagctactcgggagcctgaggcaggagaatcgcttgaacccagtaggcagaggttacagtgagccgagattgtgctactgcactccagcctgggtgacaaagcgagactccgtctcaaaaaaaaaaaaaaaaaaaagcctggagcgaagacgtgcatgcagggtcaccatgccaggctgtcactctatccagccatttgctcctcaccatgacttgaaaatgatccccattttatagcaaatcccacctccctgcttacaagctgtgtgacctcgggcaagttacttgaactctctgtgcctctcgctgtaaaatggaaatattaacataatagtacttacctgctagggtagctgagtgcttgaaatgacaactcaagcatggaacaaactctcagcccagtgcccgaggaggtaaacaccggctcattttctcattatgtggctcaggctcttagcaaaatggatttgtgttctctgacctcgtgcggccactgtcacagccagctggaggtaggcagaggccagcctgaggtgaacatgactgagttcaccactgcttgtcagggtgcctgcagtcacggctctggggcagccaggagatgaccctgggtcactgccaccagcagggacttcctttgggcggcttggagcagacagcacccagctctgcagacctgagcaccccatgtgccccaagtgacatggagcagaacccggggaccccggctgtctgccctccaccctgggcgagctccggatgccgcaggaaaagacgagaatccagcacagttcctcttctgcacctcacatcccaataaaatatttattatttcaagaaataaatctttaaaaaaaagagagaaaaagagtgtctctattgctttccc

SEQ ID NO: 736 - DNA, 2468 bp, Homo Sapiens
ttttatcttggtagcaaggtagcaagacttttccaatgcaggaagcttcagtgctttcatttatattctgatgtaagttatcttattgcagaccggtaacaaacactgtcttcacagccatttgagccttaggtatgaatggagcagctttgggtggagggatatctccatgactgggtgggaaaaggtccagaaagacaacattggagtcaccaaatactaactgttcactaggcttggctgttataaaagctgccaaaattcatgcttatggtttgactggatttcttttctctgcttagtatgcccttcagtagaagtgccaaaaaaaaaaaaaaaaagacaaacccagttatatagcccaaagaagaggattaagttagttatctgcagcctctggattgactgtgaagtctgtttgaaaatgggagtgttggccagtaaaatgtttccctaaaaaactcgaagctgaggccgggcgcagtgtctcacgcctgtaatcccagcactttgggaggctgaagcgggtggatcatgaggtcaggagatcgagaccatcctggctaacacagtgaaaccccgtctctactaaaaatacaaagaattagctgggcgtggtggcaggcgcctgtagtcccagctactcgggaggctgaggcaggagaatgccgtgaacccggcaggcggagcttgcagtgagcccagatagcgccactgcactccagcctgggtaacagagcaagactccgtctcaaaaaaaaagaaaaaacaaaacttgaagctgagtgtttctggggactctcatgagcatttttgaccatcaatttagaagaaatattctgatattactattgcattaccattattttatctagattaaattgcttcatttcttaaatggttcagtctaaatgggaagacttgataataaacaaataataactaaaaggattagaaagattctatgattctagaattctttcaagtacacagttattttagagatccacttccagtatttattcacttcattcaacaaatattaagtgcacacctcctatgtgccacacaatgtaccagggctacatggtatacaatgatcaataggagacatggtcccttatggtgtttgtaatgtagtgggggagatataagcaattaaatccaagtcaatgtatgaataaatatataacaatgaatcgtgaacctcatacgaaatgaaaaggcaaatagttaataattgtcagacataaatttcagttcagttgaattcagcaaatggtttttgagcatctattttgtgccaggcactgtgcttagtattaaggatacagagatgcataggagaacattcttgtcctcagatccacttggcactatacctgagtaacacctacgcctctcctcaactcccatttgattttgttggttgatttgtgtaggtttggctatttcacctgctgttcattccacactcttagtgtgtaacagtgaggtagggctttctggtacctgtttgtctgcagatgtagaatcaactcttgtgtttgtgaatttgactcagagaaaatatttaaatgatttgacctttgagatgcccagctgagctgctgagcggacacagactcaacagaactaagaattgttgaacatctatcataaaattataggcttagattcaaagtgatcacaggatatgctcatttcttcccttcccttcccttccctccctcccttccttccttccttccctttcttccttccttcctttctctcttttctctttttctctttctctctatttttctctctttccttcctttctttccttccttttctttctttttttttttagctttgctttgctttcttctttctcagggtctccctatgttgcccaggctagactcaaacctctgggctcaagcaatgcccctgtctcagcctcttaagtagctgggactacaggcatgcaccaccatgcccagtttgctcatttatttattgtatctgggagtcttccacatgctaggcactgttctaggcacggggtaatagcagtgaacaaaacagacacacaccccctcccctcatgcaacttgcacctcacccaacgtttaacatatcctgacagtcggtcattcctttcaacttaaacatcttcactatcagagaactcatctccttatggggagttgtctcatttttaaacagtttgaaatattggaaagctctttattatactgatcccaaatccttttccctgtagcttttacctgctagtctgactaaggttctatatttgaaccagtttggaaatagctaatccttctttctgggaacccttcaaatatttgaaaaaaatacttgtgtttcttttaaggctccccattttgttagctgatatagagaaatatgtgtagatacacgagtacttggatatcatctaataaagcaattgcacctcg

SEQ ID NO: 737 - DNA, 2470 bp, Homo Sapiens
ttttatcttggtagcaaggtagcaagacttttccaatgcaggaagcttcagtgctttcatttatattctgatgtaagttatcttattgcagaccggtaacaaacactgtcttcacagccatttgagccttaggtatgaatggagcagctttgggtggagggatatctccatgactgggtgggaaaaggtccagaaagacaacattggagtcaccaaatactaactgttcactaggcttggctgttataaaagctgccaaaattcatgcttatggtttgactggatttcttttctctgcttagtatgcccttcagtagaagtgccaaaaaaaaaaaaaaaaagacaaacccagttatatagcccaaagaagaggattaagttagttatctgcagcctctggattgactgtgaagtctgtttgaaaatgggagtgttggccagtaaaatgtttccctaaaaaactcgaagctgaggccgggcgcagtgtctcacgcctgtaatcccagcactttgggaggctgaagcgggtggatcatgaggtcaggagatcgagaccatcctggctaacacagtgaaaccccgtctctactaaaaatacaaagaattagctgggcgtggtggcaggcgcctgtagtcccagctactcgggaggctgaggcaggagaatgccgtgaacccggcaggcggagcttgcagtgagcccagatagcgccactgcactccagcctgggtaacagagcaagactccgtctcaaaaaaaaagaaaaaacaaaacttgaagctgagtgtttctggggactctcatgagcatttttgaccatcaatttagaagaaatattctgatattactattgcattaccattattttatctagattaaattgcttcatttcttaaatggttcagtctaaatgggaagacttgataataaacaaataataactaaaaggattagaaagattctatgattctagaattctttcaagtacacagttattttagagatccacttccagtatttattcacttcattcaacaaatattaagtgcacacctcctatgtgccacacaatgtaccagggctacatggtatacaatgatcaataggagacatggtcccttatggtgtttgtaatgtagtgggggagatataagcaattaaatccaagtcaatgtatgaataaatatataacaatgaatcgtgaacctcatacgaaatgaaaaggcaaatagttaataattgtcagacataaatttcagttcagttgaattcagcaaatggtttttgagcatctattttgtgccaggcactgtgcttagtattaaggatacagagatgcataggagaacattcttgtcctcagatccacttggcactatacctgagtaacacctacgcctctcctcaactcccatttgattttgttggttgatttgtgtaggtttggctatttcacctgctgttcattccacactcttagtgtgtaacagtgaggtagggctttctggtacctgtttgtctgcagatgtagaatcaactcttgtgtttgtgaatttgactcagagaaaatatttaaatgatttgacctttgagatgcccagctgagctgctgagcggacacagactcaacagaactaagaattgttgaacatctatcataaaattataggcttagattcaaagtgatcacaggatatgctcatttcttcccttcccttcccttccctccctcccttccttccttccttccctttcttccttccttcctttctctcttttctctttttctctttctctctatttttctctctttccttcctttctttccttccttttctttctttttttttttagctttgctttgctttcttctttctcagggtctccctatgttgcccaggctagactcaaacctctgggctcaagcaatgcccctgtctcagcctcttaagtagctgggactacaggcatgcaccaccatgcccagtttgctcatttatttattgtatctgggagtcttccacatgctaggcactgttctaggcacggggtaatagcagtgaacaaaacagacacacaccccctcccctcatgcaacttgcacctcacccaacgtttaacatatcctgacagtcggtcattcctttcaacttaaacatcttcactatcagagaactcatctccttatggggagttgtctcatttttaaacagtttgaaatattggaaagctctttattatactgatcccaaatccttttccctgtagcttttacctgctagtctgactaaggttctatatttgaaccagtttggaaatagctaatccttctttctgggaacccttcaaatatttgaaaaaaatacttgtgtttcttttaaggctccccattttgttagctgatatagagaaatatgtgtagatacacgagtacttggatatcatctaataaagcaattgcacctcgaa

SEQ ID NO: 738 - DNA, 9223 bp, Homo Sapiens
agggcgcgccgcgtcccgtccggtcccgtcccgttccgtcccgtcgggtcccagccccgccaactctcaccctgcccggcccttccagcggatccacttgcagcccccgacccctgacttggtccccgaggtcggggctcggtgggaaggaaagcgaggggcttcccggaaagaaagggaggaggaggcaggaggaggcagacgccgagagaggagaaaaggaggccagaggcagagggaaaaggaggagggcaagagaatcctagagcgggaagagcgtgggctctgcgggacgtgggcgagaggttaccagggaaagaatggacattgacggcagagagcaagtttagcctggagaggaggaattgagtgagcaaagggggtagtctggggtgcgatgcacagaaaggcccgtccagggtaaccttcacgtctccgtatccgttgctgtcgactttccagagcctttgttcccagtgacgtccctattgcaatggagggacacacttcactttccccagccccccacctcgagaatttctctcaccctcccaccctgcggggccgcagagcttgctcctcacggcaggagttggagccctgacgcttgccttcacctagtttttgtttggtttggtttggcgttgatgggacaaagtcagccaaactactttgccatcagcagagaaggaaagctttgaggctctgcttggcaatgtatacaagacaccctccagagggatggcagctgtagtaacgtacaggaaaggggtcctgatccagaccccatgaaagtgttcttggatctcacgcaagaaagaatttagagcaaatccacagtgcaaagcaaaagtaagtttattaagtaaagtggtgaaagaacagctactccatagacagagtagtacttcccgaaagtaaaaggaggaacacgtccaccctaggtataatgcttttgtgtgtgtgtgtgtgtgtgtatgtgtatatatatgataaaacaatatcatggtgagatgtgctctgctacaagggtttgtgataaaggattaattttcttaattacatttcacaagaataaatattattatctttaaagcaaaattaggaatgcttttgttctcaagataccaggatattaggacactcccaagtctgggtctgttgaataaacattatcaatctgttcccttaactgcaaacatctagaggctagaaatacctttctttctgggatgcagcccagcaagtcccagcctcattttccctgccctcactcaagatggagtcgctctagtttgaactcctctgacattaagaggtggatttatagatttactaggatgttaatgaagcttaatctccaggacttgtcacttgcactagcccattctaagacttgttgtgttcttggggtaaccacggaagaagcactgaccctagccatgcacaggcagcatgaagtacaaagtattgcccaggctgggagtcaccctctataatctggccagtggtacagggactgcagtaggactagtaggctgtcaacaatacctccatatcagctgagctccaacacacaacctgagcctcaggactcaatctttgaccttaagagaaaggaacaaggacatgcctccctgcctgtaggccgctatgaccaaggattaaagataattttttcttcctctcactcctcttctaaggtactgcccagtaggaacaggaggcagcaaagacctaacaaaagtggaccatatacatagtagcagccatcggtgtccataagccgtgatatcaaagagctggagttttcccacttcttttccgagcactgcctgaaccagaaactcagatgtgacattaccagtaatgagtggtgaagcttcaagaaagctttctgaactttccttttccatccattgtgctagagagaaaactgaattatattttcaatctctctagagaaaatgttacaaaatttttcatatgaggagataatcaaagtgtacaacccaaaaatgtagaaaacaattgttacagaggtgaaaggcagttaattaataacttatttttctggattttgtgatgtttgtgctattcatgtgctttttaaaaaacgttgtattttgcgatttcctcattttcatagctaattttgcattcataatttcatgttctttttcttaaacaaggcctacccatctagctctggtctgtccaacacaagctgatctctggctcccatttgggctgttacgtattgaaggctaacctttctgggacagacgcagaaggcacatctcatctttatgaggtccaagttaattaaatcaattgatcataaatgtaaaggtttatatctgaactctcaagtctctttcattgatctgtgccaattcctgtgccaatatcacactttctcaattcctgtggctttatagtaaattttgaaatcaaatgtgtaagtccatcagtgtcagtctttttattcagaattattttggctactctatgtcttctgcatttccccataaattctagaatcagcaagtcaatttctataaaaattcctattgggattttgatagagattgaatggaatttgtagatccatttggagatatctgccatcttgaccatatttagctttcaatcaataaatacaaaatacatctccaggtatttagatatcttttgatatctctcagcaatattttatagttttcagtgtacaggccttacccttcttttgtaaaatttatttctaaaagcattatacttttttgatgctgtgaatcaataatttttttcttaattttatttgtagaatattcataagaataaaattttcttaattttatttgtagaatgttcattgctggtatacagaaatataactgtttttgcataccgatcttgtatcctacaactttgtaaaactcagttaatctatttgcttttttgtagacttctgattctctacataaatagtcatgtcatctgcaagtaatgagttttacttcatttcccatccagatacctttcgttttcttaccttattgcaatggctataatctcaatgacaatgttaaataaaaatagtaagaatgaatatccttttcctattctcaacctcagaagcaaagcactctgtttttcaccattatagatgatgttagctttgagttttttgaagataccctttatcaatcaagctaaagaaatttcttttctttctagtttgttgagagtttttatcatgaatgaggattggattttgtcaaaaacatttctaaatcatgtgggtttttgttttattgtattaacatattacattaatcactttcagatattaaatcaaccttgcattctaacatgtgtttttttctttttcctttttttggaggcagagtctcactttgtcacccatcctggagtacagtggtgcaatttcagctcactgcaatctccgcctcctgggttcaagcaattctcccgcctcagcctcctgagtagctgggattacaggcgtgctccaccatgcttggctaatttttgtatttttagtagagatgaggtttcaccattttggcctggctggtcttgaattcctgacctcaagtgatccacccacctcagcctcccaaagtgctaggattacaggcataagccaccacatccagctcctaacatgtgtttttaatggctatacctagtctttcctcatttttatcctactataactaatttttatgagcaaatacagagctacatcaactggggatcctccaaaattgacagtaagaaacatgctgttgcatttgcaggcatgcccagggtccagataagtatgcataaatattgtgttgccatagtgattaagggcattcttcccaagatgatttgacaacagcaaatcttttataagtaccttctctagaagtatttggcaatgatcctaccacttctctgaatattcagtagaagtacagatgaagtaggatggtctagtaattaaaagtatgatctctgcagacaggcaggctccccagttcaaattctggctctagcatctacttgctgtgtgactgtgggtaagttaaactctttgagccttagatttctcatctgtaaaatccctctttggtaaaatgggataataaaagctaccccaaagggttaatgggaagattgccagtaaatgttaagtagaacatacagttcagtacctggcatgcagagctcaacaaacagtagaaattacgactaagacagcttcaacaatcccctcagcttgactaaacttcagacaggtttctttgtgagcataggccccttttcttagatcatttactttagaaaacttgcaattataatttctttctctatccctttgtgaagtaaatcttctacaacccaggagcatctttctccaaagcctaagaaccatgccttagaaatgtaatcaccaagaaaaattgcacctttatttctttgtatctgtgggaaaggagaagcctaacttcagtaggtgccaattagcaaacacagatagcctgatcccatttaccgatctcacctctagtgtctttcagtacttactaactcacctcaatgcttaaaattctcctgtctgtttcagtgtgattgagttcaatttctcctccattgtgatagtcttgatctcttttgcaattgtcttgaataaagtcttccttgcctaacttgtccagtgtaacttttcttacattataatggttattatacggagaaagaagcatgggttctcctggttgtttcagctgtataactttagtcaatatccactggagagaatttcaataaaagaaaactatttctttatgggttaaaagggatgggcatggggggcaaaataagaagcactgtggttcaattacagcgttctcatttcttctgaaatcctctagttgagtattgtaatttaaatggaacaacttatctccctaaaagactgattttgaaagactatttccctttccctgttaactgctcccaacccaacagccatcatcatttttaaaggaattctaagggcaaagaaactaagaatctaagagaatgtaatacaattgatgacccaaagaaaagcagcacatattaaattgtgacttaaatgctattcaaaacataaaatcgtgccattgtagtatgtgtttgcctgtgtgtctgtgcctttatttctcaatgatgaattatatttcaatgaaaaagaataatgccttccaagtaatagtatcgttatataagagacaattatgccactaaatttagataatttagaaatagtcttaaggagagaaacaaaaattaaaaagtattgaaatacaaagtaaggaactgagattattgtttttctcaatgaagataatatttacttttgctttaagatctagatatgacaaatgttttctggttaacaatttatccaaaaagaaaaaagaatgtcaaccttttttttttctctattccagagagctccagaaggtttttagatttaaaaaagaaaacaaaaaacaataataatactcaaatgtcatattggaagccttaggcaagagctgttggtcttttaatttgctcttaatactatgatcaaataaaaagaaggaaaattttacaaatcattaacagcttcgaggatgagggaagaacagattttcaagcattcttctttatttagtcagaaatgactggctcaacctcagcctacttctctgaggcacattcctaccaactcttgcatattaaattttgccagagcaatgggcctgacatggccttttgaatcacagtgaatcacagtgacccttatccaactgaatgtctcctccaatcatgtttaatgtacatcaagcattctacagtgccaagatgaagacctgcattgtttttttaaaacccacattaccttgtcattgtgtaagagaaagatatatttaggattgaagggtgcttcttattagacccattcaggaagaaagtaagtctagaggagccaagctcaaaacatactcttcaccatacacaatcaaattcctctcagaaataatgttcttcttctccatctatattttggaaaattacatgaaaatcagtagatacttgtaatgcaatcagtgctgaattattactcaacaagctgagtcttcgagggcaccagcaaaacagcaggaatgactaagaaaagtttaactttgatgaatttatgtagcgtcttgaaataaaatgtaaaaatgaagccattttcatttcagtattcagagttttataacattttgaaaaagtaaattttcttttgaagattttataaattacacatggggttgttattacaatctcttcagtgttcaaggtttctaaaattctcaattcagccctggatacaaaaactctaaacacagagggttaaggtattaaagatgaaagctagtacccttacaactatttatattgcaaaagctttgccctcctgcaagaacatgcagtttcccaaacagtaacctctctttacaaggttatgcttattagctgggattcgaagctcaatagcaacactgttcatccatggttcaattcagattgtaatttctttttaaactacctgacccttataatcatatggtgagttggtctgatcattcatcttctcgaggccaagtacttggtctgaacacagagtcacttgtgtttctgaagcctctctgcatcaagatgattggggtgaaaaactgtcaattgaaaaaagtttgaaagaaaccttttatacaatgttttcattgtcttgttctttttctggaaccacaatttctgattgggaaaacaaaagtcttcctagatacaagaatgaggttttaagagataatctttgtttctaattaagtgtggaagctatcaactatcgcattgtccccaatgtcagaatgtgctgaataagattttgctttttctcagggcccagcatttattaagcactcagcaaatgcttactaaatgaatgaatgactctacccaagcttgtgtctttgtctcgaagctgtatcttccatcacagtattaaaatgttttttatgaacatgagcatctggctgcacatacagagcagcacattccacacactgccctaattggatcaccaattggaggaaagtaagtcacaagctgattgcctagagtgggtttttccccatctctgaaccaatctctgaggcaaaaagaatgctattaggctgactgatttatgtaaagcagtgcctatcatttctgcagttaggatggagtcaattccatccaaagccaatagaagagagacagtactctaaaagaaggcctaggagccatgaataactgccgagggtaccatagacactgggttggacaagcaagaaatagtgacgatgtgacttctatttttatgatggctcagcggaaaattagtaaatacaaccagtgtgttagaaataattccgtatctcctaagatacattggttaaaaagatactaataagtttttgtgcgtgtaacatttgacaccaggcttttaagtaaaacaccctaagatggaacttactgtgtagtggaaagagttagactcactagacattgattagctgactgacatagagcgtttcttatcagtcaacaaaactatttccagagaggcttgaaataaaacagttgactttatgtagattatggttaatatcttttgcagattttctaagaaatctttccctatcagaggtccccaaaacattcctttatcattttccttctaaatcttttatacatgcttaagaaatatgcacatgctctaaattgggggaacatgatcctttatgtattaattgaatcaactttggttaccatgttgttctatttacttttttgctgctcgagctaaaaattgagtgacttcaaatacaacataatagtttttttttccgttttgccctctacatttttactttaataactttgtttagaactgttatacctacttcagttgaaatttttattatttttgagagtctccttatccttattaatgcttttcactttaatatttgtaaggctaatactgatacagctatcctaaccaggtatatttgcttgttttattttccctaattctactttttgtctttctctgtccttgtactgtcttttgtaaactgtatatattgaacaaggtagacttttttttttattaatctggtgagataggcaatttatatttattgtaaccatttattatatactatgccatttctttgctttttctatgctttttcttccttcttgcatttttgtggtctatcaaagttgggatttctaaagtgtttttcccttatttcagaatgtttcctctctactggtttgaaagttatattgtattgctattctttaaaggttatctgaaaattttctgttaagtacttagattaacaacatctaaagtcattcattatcttaacttccatcctaaagagtatcaggatcttggagcactcacactaacttctaagtgctcccggacactttccccacatatacatttcctgagttatgtaaaatgttgctagtattttaattacgctcttttttactccacagagtaaatacttcttaatatagacagtatttatttacatttcccatgattactgattttttagctcaccataccttcttgcatctcagactttcctcctagtcattttgctgtactctaaaattcatctttattcttaagtgaaagtcccttgtttgtaaattctcattttgagaaaaaagtgtttttaatatacccttgattttgaaagataatttcactgggcactcattctattgagttattctctcagtaccttaatgatgttattccactgtcttttgccttccagttttggcactgaaaagtctactgttggccaggtgcagtggctcatgcctctaatcccagcattttgggaggccaaggcaggtagatcacctgaagtcaggagttcgagaacagcctggccaacatggcaaaatcacgtctttactaaaaatacaaaaaaattagccaggttgtggtggcgcacacctgtactcccagctactcgggaggctgaggcaggagaatcaattgaacccgggaaatggaggttgcagtgagcagaaatcacaccactgcact

SEQ ID NO: 739 - DNA, 152544 bp, Homo Sapiens
agtccgccattgcaaacacgaagctcttccagaaacgccctcacagacaccccggaagtcacgtacccactctgtaggtgccccggggcacaggcaagcggacgagccagttatccctcagagctcctgctgcctcgcccgctttctctcggaaacgtgaagtgtggcctcagctgaaagtgaggtgggcctcattcaatcagttgaattcttcaagagagaaaaactgaagtcccttagaaggaaagagttctgccttcagactgtctttgaacttaagactgtagcgtcgactcctgccggaatttccagcctgctggccagctctgcagattcacacttgccagcctccacaatcgcagctgaggcggaggaaccctaagggctcattgagatcatggatttgcccttctatgcattgatggagcacctgctgcccacagcgtctgtatttggtgctgggatgctgagcctccttctttatgaatttttaaaaggacactgagatcttcaaacagaggctgccactctaagcaaacagatcccgagccctggactctgaagcttgggcccagttctccttttctccgggtttcagatcccactgtgaagtgagggggcccttctgattcaggacccggggaagccaggggcatgagcatcggtgcctcttctctatttcaaggacccttctgggtgtaaagttctctgagatgccttacatggattcccaccactgcaagataaccatcgtatgtaaagtgttatgaccagcagagcgtaattgaagtgcattccagagggaaagacagcggctcagatgaggcttcaggcttgaccaaatctgactggctggctgccggagacactgctacccatcggcccttaataaatggcctcatttgatcatcatgtgatcttcagaagctgggcttgattatccttgccaaacaaaatgctgaaaccaaaaatctgaaaggtatttcttgctaagtaagggagagctgtgcttgtagagtgtggtcaccctgaacagcgcaaactgcttgtggagctccaagactggcagacttgggagggggagcatttagggattggatgactttggccgtggactcggggttgggacagtgaggctgccactgaatggctgtcactcagaaatgtagttactgataaaaagttgactcaatttgtcagggcaggcttaaaatcagttttggtagttactttttgtcatggctgaagagcaatcctctgtcttcttgaatttggacctttatttggacttgagtttggaaaaactaagaaatttttgttctcattttcattacatgcttgagaaaactgaggctcagacaggcgagtaagtttcccagggtcacgcatttaccggctggcatattaaagttttgaacaaagtccacgcttttcttacacactattctcattagtattagttttagtagtaatcgtagctgtacttttggttcataggttcatagagagttgttaatcctactcctcactgataatccattctcgccatcatgccctacaagacctctggttgtttaattccatttctccttcatgctggatcccatctcccatcccctctccacccctccgacagagtcactctttctaatgtctttttatctgtacctaaatatttgtgtagctttgaaaaatctaatttgtcaagggttatgtgttcattttacatttccatacatgttattgtgcaatatatagatctcatttgtttcctaatttttttcactcaccactgttgtgaaaacacactgacatttctgtatgaccctcttctgacctttgcttcacagcgtgcatctaccataccttaacctaccctgttcctcttgtcatggacccctggattgcctctggctccccccaacacacaccttactgcaacatccacacactggggtctttatggatttccctgggttttcacttaggagtgggattgctggatcctaggagacacccgttaattctgcttggcacagacagtttgctctgtgtggcaggccatattcccatcagcagtgcgtgaggggttcattctgccacatcctcaccagcatttttatactccttgaaagttttgtcagttagatgaatgggtgcaaaatgtaatcttaacattgatttaacctgcatttctgtgtttgccaaggaagttgtgcgtctcttcattacttagcagccattcaagtttccctttctgtgaagctcttattcatataccttagccaatttgatagtccattgtttttattttgttggatttcactatttccttgcatgttctagatgccaatatcttgttgattttaaaagatgtagtcattctccccccaatctgtcacttgtttactttaatgatgcctttttatctcaaacccaaatttttaatgttgctattgaaagggcaaaagttcccttatccctgtcacagggtgtgtgatgcgggagtggctcacttcctcagcgccccgctgctgagacctttaggggagcatgcagatgggccggttgtgtggctccgaccccacggcagcgtctaggggtgaatgtttacagctgctgaagccacagtgggcgtgtgttacaggatgctcttttagttcagccatccgtaggtggcttgtgttagctcaattagacacccttccttatcacaaggacacagggatttctgtatcccggggtttcttgccttggtgtactggaagaatcggatcagttgtgggcttggagaataagtgtaagtttgtttttttgttattttattattattattattattttgagatggagtctcgctctgttgcccaggctggagtccaatggcacaatctcggctcactgcaacctctgtcgcccgggttcaagcatttctcctgcctcagcttcctgagtagctgggactacaggtgcccgccactgtgcccagctaatttttgtatttttagtagagacagggtttcaccttgctggccaggctggtcttgaactcctgacctcattatccacctgtctcagcctcccaaagtgctgggattacaggcgtgagccaccgtgcctggcctaagtgcaaggttttattgagtggaagttctcagcagatggatggggagccagaagggagatggagtgggaaggtggttttcccttggagtcgggcagctcagtggcccaggctgtcctctgacctccctggttgaactctgtgtcgttctgcaggtcaatggcctgccagcctgcctgtgtctgtcagtgtgctgttctgctggggccctctccacatccagctgctgtgtcgtcttccactgatgcgttcctcttgacatccagccgcatgtgcatgtgtgtccgatggggcctcggggtttttataggcataggatgggggtgtggtgggccagggtggtcttgggaaatgcaacatttgggcgggaaaacagaaatgcctgtcctcacctaggcccatgggcacaggccctgggatgaagccctagccagggaccacaccttcctctacccagcacgtccctgtcccccttccatatcactgtggtaaaatccagtttttttcaccttagattttgtacatttgaggtatgacataaagtgcatattcagttcaagataaaaagttttctccaatagtctcctattagctttatttttatgccttttcatttgagtttttaatcaatctagagatcattttacttaggatgtaaggaagagttccaattttagttttacccatcaggcaagccagtggtacccaaagccatgtattaaaaaagtctattcctgtctcactgatgtgtgtcacttctgtcataaaacagatccttaaacacacatgggtttggtgttgagctttctgttttgttccacttatgaatttaatatttctgtaccaaaactgcacttttttttaagtagtattttgtggaattttttcatatcttgtaggtcaggtcccttttattctctttttctgaaattgtttattttttaaagaattttattttttcatgtaaatgtcagaataagattgttgaagtcttcaaaaatcgctcctaaaattttttttttttaatcagaatctcatttaagtatggcttttgtggagaactgccatttcttcaaatgttaaactagtccattatgggatatggtatattttctctttattctaatctttctttatatcctttaatgaattttaaaactttctctataaagaatcatgaattctttgttagatttattcttagatatatttaagtttttcttgttattgtaaatgttatattgttttattattatatgttttagttagaaattaccagtgtgaggaaacatcatggtatggttgaaatcacacctcttaatttttgtagaactcttaattccaatattgcgtgcattgattctgatgcattttctatttaggtgatcatgccatctgcaaataaggatagccttgacttgtcttaatatattcttctacctcttgttgatctttctcttgatgagtccattggacagctttaccagtagcaataagattgcgtttttcttgtttccagtcttaaaggagccatgcctcaagtccatcctctgaatatggtattcgtcaaagacaagcatagttatttatcagataaagaacattctcctttagttacagtattctgggaatactgtatgtaataataataatgtaaataattttatttaaaaacaagttggatatttacaagtgcatttttttttgcttctactgacctagtcaatattttttctttcttcatcttagtatcttaaagtggtgaattaaattcataggctttctgatgttaaaactttttttcattcctttgatgaactctatttataatgatattattattattttcagacaacattaaagtcaattagcaaatatgtaagtaagacttcataagtgaaaagagcctatactttgcattttgaagtttttttttttttttttttttttaaaccagctttggaatcaagcaaacaattttataattaacagaaggtctctgtctctgtctgtctctctctctttctctctcattgtttggaacaacttgtgatttgtgtaagacatagattctttcttgtttaaaagtttgatgtaacttttttgtggaatgttcttggcctgattttttattgcctttttttttccctcttgggggaggctttaattaccattatgaattttaaatgaaaatctatttatccttgctccaatttggaatatcatacttttccaacagtgtgtccatgttgccttgtgttttcaaattgatgtctttataaaaaagattttacattgtttttgcagttatttcctcttttggattctgttttgtaaatttgcatcttccccttattgtattgactagatttgccagagctttttgtatattgtattaatattttaaagaaattgcttttggttttgttaatcttccctatttcattgatttatgttcttatctattttattttcttcttgtttgtcccttttgggttgcttctgtttcttgtttgttttctgcttggattgaatacttagctcattttttcttactttctgataaatacatttaaacatatggagctatcactacagtgtggctccattattttgtaattctcttatgttttactttgtatcttaaagtccttttagcagaatgacattttagtttttgaacatatggtatattatttatttttaatcatttttgttactggtttctaatttcactgctttgtgctcagggaacatactaagctgggtggattgtttgggctcattgtagcttccaacctcgtccatcatccgtggttgtgaaagcttcgctccacacacacatatattttgctctgggatttttattaatcttgtcaatcaaattttgtatgcatttatgcttttttgttttgatttttttttttgtccctctaatctaccagtctctaatagggctttgtgaaaatcttgggcaataaattttgttgtctctatgttctcttgtaatgctgtcagttgttattttatatattgtgatgagctattttaaagggcttatttattcataactactatcttcttgatctagcacactgttttggcagtatataacatcgctttttggcatcataatgtttttcatcttaaaacccatttagcccaatactaaaaagtcttaccttgtatttgaaaaaaattcttattgaaacaacctttggaaactacacacatactttccttttaattatttcatgtattaatttatgtaagttttcatatccatttttacttctcattatgaatcaataaattggttttctgaatttaactcttggactagagattctgctctttgtgtgccgagaattagtttgcagagacccaggtctgcagccatcatgaggactcaacttcgccacacctcacggaagagccccctgtcttctccccagtgctgtgtgatgcagattccttttacagcctgcctgcctgcctccctccctccctctctctttccctttttccttccttccttctttgaatgttacttttttccttctctgaattgtaatacagacatatggtaaatggcataaacatggcacacgttgataagtaaggaaaaggagactcccctgtaagtgctcatgacctcaacaccaggtcatgaaatggaatattaccagcagcctggggttccctgtgtgcccccagctgtctgcagtcatttctgtctcacttgcctctaggtaacaactattgtcaccttagactcattttcttgcgtttctttatggttttagctttggacattcagttctgcctgtgctgtttcatgcaatgaaatcataggtgagtctcacatgagtggaattgtatctgtcttgtttcactcaacattatgttttgatgttttggggtttcatccatatttttggatgcacctgtactttactcatttttgcacagtctgggagtttgttgtatggctatacaaccatttaattttccactgttcagtcgatggacactggagttggtttctagtttggggcaattacaggccaggttgctaggaagggtttcacacgtgtgtcctagtgggtgtgccagtgagtttgcctagagtttgtacttagtcatgaattgctgggtaggagctattacctgcaacttgactagataatatcaaatatgtccaaagttgacattccaatgagatctccagggtttgtgagctgttattgttccgcgaccacactgatattcatatttccagttgtttactaaagggctaataagttataaatacattcatttgcttttcagtctagtgggcacgtgttgccatgactttattttgccttcccctgattagtttgttagtcatttttatcctctctttctaagtatctgttcctatatttttgtctaccttttggggttgcttgtctttttattgatttgtgtgagttaaaaaaaaaaatgcggccgggcgcggtggctcacgcctataatcccagcactttgggaggcgaaggtgggtggatcacgaggtcaggagatcgagaccatcctggctaacacggtgaaaccccgtctctactaaatatacaaaaaaaaaaaaaaactagccgggcgtggtggtgggcacctgtggtcccagctactcgggaggctgaggcaggagaatggtgtgaacctgggaggcggagcttgcagtgagctgagatcacgccactgcactccagcctgggcgacagagcaagactccatctcaaaaaaaaaaaaagcagccgggcgcagtggctcacacctgtaatcccggcactttgggaggtcaaggtgggcggatcatgaggtcaggagattgaaagactgtcctggctaacacagtgaaaccccatctctactaaaaatacaaaaaattagccgggcgtggtggtgggtgcttgtaatcccagctactcgggaggctgaggcaggagcgtgaacccgggaggcagaacttgcagtgagccgagatagcgccactgcactccagcctgggcgacagagcgagactccgtctcaaaaacaaaacaaaacaaaacaaaacaaaaaaatgcttgtcttggtgcagtggctcatgcctgtaatcccagtactttgggaggccaaggagggaggctcacttgagtccaggagttcaagaccagcctgggcaatgtagtgacaccccgtctctactaaaaataaacaaaattagccgggtgtgatggtgtgcacctgtagtcccagctactcaggaggctgaggtaggaggactgcttgaacctgggaggttgaggctgcagtgagctgtgatcatgccactgcactctagcttggcagacagagcaaggccctgcctcaaaacaacaacaaaaacaaaaacccatatatatatgctttggagatgagctctgttttttgattataagtgcaggaaataccttctcctgctccgtgtcttgtttctcactcttgcctaatgtcttttgatgaccaaaagctcctaatttcagtgcagtcaaattcatccactttttttatgtctgagaaaatcttatcttaccctagtattaaataatatgttagcttgatataacaatctgggcacaattcttttcttaatatttaaaaattattgttatgctattgcttggcttccattgttgacaattgtgataccaactcgattcttatttatatttattgctgtttttttcctgataacttttagattttttccttatttctcatgttttaaaaatttcttttacctttatctagttttgcttttttctttctttttttggaccctttgagtcttttaaattcaaggtcttgcatttcctttatttcttgctaattgttggtcatcaatttttaaggcatcctctaatctctgttcatttctctgcccttctggcaattctgttgcatgcacttggcacttccctcctccagcgtccctccttgcattttctgtctctccatttccccttcatgcttcctggcgctagcccgctagcccggtcttgctctttcacatactgatatgtcctcagttgtatccattctgttactcaactcatccactcggttttaaataccaactagtatgtctttcaaatgtatcatctccagtgtagtcttctttataacttacttcagctccatgtcttcgtcttttcttttctcttttataacatctttcatttctactttgatatagttttgtttaaaacatgatgatagcccctaaatgccatgattttgcattgtgagtgagctaagaatccctgaggacattaagcattgtggccagggatgcttccctggggatgtgatggctgcttggcctggcttttggctttccttctgggttgtgcatggaggagagatgcctcaggaaggagtctccagtgctagtctatgtaactctcccttgcactgctttttttttttttacacagcatttagctcttgttgcccaggtgggagtgcaatggcgccatctcagctcaccgcaacctccacctctcgggttcaagtaattcttctgcctcagcctcctgagtagctgggactacaggcacatgccaccacgcctggctaattttgtatttttactagagacggggtttctccatgttggtcaggctggtctcaaactcccgacctcaggtgatccacctgcctcggcctcccaaagtgctgggatcataggcatgagccactgcgtccagcctgcactgctttttaaaaaagtttttcatcttactcttagtgttaatcatctcatcttccagatctgggggtggtggggcagaggagaaggaccctggggttggcaggtccatcagatctggggttcactcctggggtctccatggggcctgcaatgaatagcactcttcttttccctgcccgtggcccccaggcctagacatgtgagaaagggtaaagatggagaccaaaactttgccttcatgttagaggcttatttagaggccagagctctaaagagacctgcaagctgaacccatgagaagggggtggaccttctcccttgcggcctccaggggccagccctgtcccagggaggaggggcacagctgagcccggcaggcccagctactttccagcgcagagtgagtggaaggtaggagaggctgggagtgtgggaactgggacggggaatgcattcagctcttcagcgtgctcccgtgcacatctggctgaaagcagcccccatgtcaccgggacccagcctctgctgagatgatagcagctgcatttctctctcgtaggcctttgtctggcattggctgactcagcacaacataggaagaaagaggaagaaagggtgctcccctctctgctcgcttaccccgctgaaaaccctcacttttctccactgtgggcagttgtattttccaccctaggaagcagacaccttttgccacctcagggcccctcagggcctgtgtgcggtcacccagcatagcccccacctctctctggctgctatggtgcttacagggcttggctcagggaaggttgtcggcagtcctgggccactttgccatgtgttggaaatcagaaccttccatgttcctttcatagctggagctgattttcccagtggcgtgcacagctcccggcctgggctgtgtcgtcttggggaggtggaatttgctacctctaaggtggagcagtagttagtgttcctggaacaatcgtagaagtaagcaggccagaggtgaatgaaacgtggggacattagcacagggggctggggcacactgcatgggtgggaaggggtgtcccttacatcaggggcatggactgtctagagagacaccatttgtccttcaactccaggtggtgtttcaaatcctgctggtgtccagaggcctggactctgtccccatcctataaggatttctgtgactgctgccgtgggactggcatcacattctcattgaggggacatgctttccttggttctaatcctgagtctaagaatgtgaggtttgcctaggcagtgtcactgtcctaatcagcaacaattgtctcttaggcaatgtcatcatcctgaccagaaacaattgtcccttaggcaatgccattgtcctcaccacaacaattgccccttggagtggtcccctgattggcttttgttcctcctgaggcctggacaccacataatttagcggactgagaacctaattaataatcatgtgctccgatgtccaccaacatcaatcgtttggaaaatctggagtaattaggaaatgctgctgaactagagaaactgttcccataaaatgtcaggtactttatttcctggaggagtgaatatcttactgactaggtcttatgtgtaaaatgcagtattctgagttaccaagttgtactgttgaaattcctttaagttggatggtggcatggaagtttctggaagctgaattctgaatagttttaatctttctttgagccttggtttcctcatctgtaaagggcataatagctttgtaaactgaactaacaggatggaatcaaaggacagcaatttttcttatagcattgcacaaacgttagcttggcctcccaaagaagcttaattttaatttaatttcaggaagaaacaaaaatgtgtgaagatgttaaaaaaattttcgctagtcatcattcagcttcagtgtctctatcatttgttttttttttcttttttttttttaagtatactttaagttttagggtacatgtgcacattgtgcaggttagttacatatgtatacatgtgccatgctggtgcgctgcacccactaactcgtcatctagccttaggtatatctcccaatatcatttgtatcagtatagctcaactgaagcgcagggaacgttctctgagccaggctggggcttctggcgggaaccggcgttccctaggaggagcccctggtgcttatgcggtggagggtggagtcaggtctgaggagccaagggctgtttggcggtgagacaaggagaagcagcagggggtttagtgtccaggccttggggagctgggagtcccctgcagtgggaagaggatgcaggggtgaggcccgtgggacacgtgggagccaagtacaatcacaggcaaaagctgggtctccaccaggccagcaagcatgaggtcacaggtccagtcacccacccaggtttgcaccttgggacaaggcctccgaccagtgtgcggtgggtagggggtctcctttgtgagtaacgggatgggaagagaagcgagggtggagaagccaccagaggtgttgacgtggaggctaggaatgggttctgttggtcttcccagcatgggtgtggccggcgggaactggaggagtgggcacaggggtgggactgaaggcaggtgtgctggtggaacgggccctgccaccaggggccaggaggggacttgtgattgggggtgtgtggaggtgagtgtggtgtgtgggggcagcgaggtaggtgggagaagaaaggtggattcttggcctcagactcactaactatcaggactcccagccaggctggaccacaaggtccgaaagtggccccgactggagtagacgtgcttggaggcttctgggcaggtgcagccacgatgacagccggcatcaaggcccttcctctgcaggccccaggtgcaggccctggtggtttgggttcagggtttatgggtgatgggcgcccagcccagtcaggttcagcggggagaaatccaaagccattctgaggggcaggctccaggccggtgcgaaacagtggggaatggcttcccgagaagccactggagctgcgcctcttgccctctgtccggtcctcctccacactccagcagaggggggtcttccagggtcctttcctcctgtggcctgggcgtgcccgtgtgcagaaggaggaaggcgaagccgtccggcatctcggaaatggagcctccagggtctgcgtcactcggaaaggcgcgggctttcccaggccagagtctttcagtcccaaaaggctttgtccacctcctccctgagtcattgcggctttgtgtgggtccaggggcagagaccagcaggaaggacgctgctcctgcctgcgtgagaagcccgtggtgcacaaacgcctctcactcctctcagtgatggaaatcaccatcagataaacaccctggcctcccattttgccttatctgccccacccccacccccccctacaggcacacacatccaagctgtttatcactgcacttttacttacagtagcccaaggcttcccatgtctagaagacagaatctctagcctggcactttgtactctgccctctgatgacctcttcaatccgaatctcctgccagcctcccgctctgtgctccagaaccccgagctgcacacaagtgtctctggacgccatgcccttgcctacttctgtgtctttgtccatgctattctctcagctggcacttcctctccggctgtgcacaccgggcaaactcctattcataccacaaaacccagctctaatactccctgctcaagggtcttcttggacccagagaggcagaattcataactccctgccctggatccctggagaaagctttgctttcccctgttgccctgtggattgtaatcaatccccactctgagtgggtggacagaagcctttcctgagaagcaggctggccgtcctggggtcctgggcttgatgtacctcccgtgcagtgcctggctagagaggaggcacagcctgcagagcatctgttctggactgaaccccggagccatcagcaagtttcgggcaagtgttgggggcttggaagaaggacgattcattctgagattgaacctgacatttatttttctcccacatacacccagccttgactttgcagagagttaaagcaaatagtaatccaggacagatttgttacatatttatttatttcccttgaaatctctacgactgcaaagaaggtgtttattttaaaatttaaattgtagctagcagagtgttgcagtgactcacttaatcacctcctccacctgaccaactccaccaaaatccctgctgcagcttcccattcaaacacccccttcacaattgtgatttttctccgccaggtgactgacagatggcctggctgttttggatgccactgccactgccaaatcactgattttgaggaattaaatcacaaaaacttacctcaaatgcaaaaaatgaaaaggaactccttcctcatttcctgcctggtgtggacacagtgtgctgtctacacgaggccttgttacaaatctgcaccccgctgcagttccattgtgcctgcagtagagaaattccagagcctggggacctgggctcaggcccttgctctcatgaccaggcagtggcagcggctcttcccactaagctgcccggaaggagctccagggactcttggaaaatgtcactgacttctcctaagactagtatcacttctccaagtacccctagtttccctccttccagcccatccttcatataattacccaatataattgtgcacacctggcaaactcctatttatactacaaaacccaacttcaacactctctcctcaggagtcttcttggactcaaaccatctgaaaggcaagcctggtggagtccacttgctggacagccggaagcagctccttttgcttttggtgggaagctcagacttcctgacaaggtccatgtgacccctcctggcctgattcctgcccctgctctccctgcccagcctcctccctcccaccctgtccccgtgtccctccagatggaactatttggtgcatctctaatcatctgtggtgatggaatggtatttttccatccatcacagatggtattttgaaaattacagcaaaaagaagttactcaaaaactgaaagcaaacagcatacaaaatatagactccacttttttttttggagacagagtctcgctctatcccccagctggagtgcagtggaacgatctcagctcactgcaacctctgcttgttgggttcaagtgattctcctgcctcagcctcccaagtagctgggattacaggcacgcacctccatgcctgactaatttttgtatttttagtagagagagggtttcgccatgttggtcaggctggtctcaaactcccgacctcaggtgatcctcccaccttggcctcccaaagtgctgggattataggcatgagccaccatgctcggcccagactccactttttatcattaatttcaacagacataaaattactctgtcaattttctataaacatttctaaacactcaatttttgtttccatctcatcgaggactgcaacaaaggctggattggcataggtccacagaccacactgggagaagctctgatcgagagttcctggaggagccggtgtgctctcttgccctaggattgctcatgctgtagcctctgccagggacccctccacccgtcgtgggcaaccgaactctcactccccttccagactcggtttcggagcctcccctcctccaaacatcttcctggaccttgtccaagtcgggtgccttcttccctgtctgtttcactgttgctggcctctacccagcacctcatcctgcctgtgggatagcgtaggtgctcggcagtgtatgtcttgagtgactagacctgtagtaaatgcaggaatgtgaagatgctgctttataccagtgcttctccaagtgcgggccacagatctccatgtgagtccgaccactttgggttccacactcactcgcgagggaattctttcatggcgtgatctagggaagaacacacttggctccagagaatctagagatgatttacaaagacatgtggtgcggtttgcttgcaggccaggaactgatgtcttgctttctgtgtccatttgttgattctaacgagaaacgttaatgagatatccctcagcagatggtaggtatggtggcatcaacacagttttacactgaaatccttaggctcaaaaggataaggcagaggcagaggagataggaaaaggatgcagatggaacttccagagatgaggccgggcgcgggggctcacgccagtaatctcagtcttttgggaggctgaggccggcggatcatgaggtcaggagaccgagaccatcctggctgacacagtgaaaccccatctctactaaaaaatacaaaaaattagctgagcgtggtggtggacacctgtggtcccagctacttgggaggctgaggcaggagaatcgcttgaacctgtgagcggaggttgcagtgagcagagatggcgccactgcactgcagcctgggcaacaagcaagactccgccaaaaaataaaaataaaaataaaaaaggctaacaaaattggtaagacctcagcaagactgataataaagaacacacacacgcacacacgcacgcacacacacacacacacacacatagagtgaggtaagggaacggaaagctgctaatacacaatatcagaatgaaagagaggatattactaagggatgcacagatgttaaatggatattgctaaaatcttgatgttggtaatttttacaacttagatttaatggataaatttcttttaaaaaataacttaccaaaacaagaagaaatacaaaatctgaagagccctaaagctatgaatacattgaattgataattaaataccttttttacaaaaaagctctaggcccaggtagcttaaatgatgaatttaacatcaaactaagaagtattaccaatcctatacactctatttcaaaaatgaaggaaaaggaaatattcacttttaaatcatttcataccagtgtaactcggatactaaaacctaacaaaaatattacaagaaataaaattatagcccaataattctcatcaacagaaacacaaaactcctaagcaggacattagcacatagaatacagtgataaatacaagcacactatgcgttactaaatggggtttattctggaaatgcaatgtttgtttaacattctaaaatcagttagtataattcatcactgtagggccccccggttccccgctctttctttctgtgtcctgaccaaaagtcatggagtgcattgaccactctgtgacccagccaggtgcaggttttccccagcagacttgaacccaaaccaggcccttgaacattcctgggcactgataaaggtatttaggttattgcccaaaacgatgaaagaaactggccgtggccctgagtcaaattccttaagccctcatgaaaaccccatgccttgtccccctcgctgaggacatacttaggtagaacacctcttttctctcactgcctgtctctaggagtgctgcagccctccgcagttaagttccccattgctgcagccctctacaggtaagttcccctaatcaatgctttgggctgatcacccaggcattctgcgcttctttctttggaaccccaactggtctcatccccaactggggctcagtttggagatgcctttgtgggaactcccctaagttgggatgtcttcagctgtgggttcagcaggatgagacaacatattaataataaaagacatacatgaaaaacctgcagctaacatctgacaaccaagataagcgactgaggcataagtctcagtcatcaaggatttttaaggcagctttagggcatgtctgggaaaaatactagccacagacacacctgtggctgttttttctgaagaagttttcaggaggattagtaggaatacttttccttgtagtgggggaaggcctccaggaagaggggcatgtaggtcttaaggggaatggctttttttcctatgagactttagtaaatgcccagtaaatctacatttcacgtaagataagatgaatgtttgaagagaaaaaaggaggaaagagagtcagttatacatatgtctctgggtaggtggaggaaatgagtcttgtctttgctctgcatctgggaagataagcttgtaatcagcattatcagtgtggaatcaaacagatttagtctgaggagctagacttaggttgtagacctaaactcacaattagcatgtccttgtttatgggaggcaggcaaagaacttactggtgaatgatatgtaggggcagcttttccagatgcctgcagccttttaccttttcctgggggtgtggcagatgcgtgttgctagtgacagctcttcatctggaagagggggttgcatgaggcagcctcggtgctaaagtttggggtcttgagatttttcatctttctttacacatcatctaacggtgaaatattgagtgcttttaccataagatcaggagcaaggcaaagagtctgcttttgatcccttctgtataacattatagtgaaagctctagctagggttagcatgcaagaaaaacatacgtggtaaaaataaatatttgaaagtaaaaagtaaaactgtccatgtcaacagatatgtatgcattattgcttacatagaaatttcttaagcaatataaaacagcaataaaaaaggagcagattaataagtaaatttaaaattgtcacataaaacaaatcaatataaagtttgtttcctattagcagcaaacaattggaaatcacatttaaaaataatttaatttatgaaaataaaataaggataactttaaaaattacacatgacgtttttatttgaaaaatgtaagtctattaacataccatataagtttataaagtaactttataaagttgaaaaagagttacataaatggagagatataccatgttcatagatttggggaatcaatattatcaatgtcaattctctccaaactgatacatatattaaatacaattttattcaaagttaaaactcattttttgttagtaataatttgatactaaaattcatattagtatgcaaattacataaatcaatggaaaataatacagagtccagatcaactcgtacaatataaaattaattaatttttgacaaagatgtcaaggtaattcaatggagaaaaaaagtatgtttaaacaaatagtaatctgacaattaaatatcaatttaggaaaaaaatcaacccttattttacaccattcactgaaattgagactatagtcttacatgtaaaatctataactgcaaaggttttagaagaaaaccaaggaatctaattgcaattttggaatagggaaatgtttcttagcaggatacaaaaagcaataaccataaaagaaaataaatggacaatttgagcttcctcaaaagtaaaagcttcttttcatcaaaagatactattaagaaaatggaaaggcaagccacagactcaggtaaaatattgccaatacaatatggcaatacagtacaaacatttgtcccaagacaaatgacttgttttagagattacatgggaatagcccataagtcagttacaggtccagcaaccatagaataaatgataaatgatttaaatagctacttcatgaaagatttgtgggcaataagcacaagaaaggggttaagaacttcagtaattaaagaaatacaagttaaaaccacaatcaatactacctctcatccagagagatgattatattaaagattaatggcatcaaatattggtaagaatgtagattaatgagaatctccatatgttgctggtggaagagaaaaaagtatatgattttggataggtattgatcagtttcctataaattttaatgtatacctatcctatgatctggtaattcctgctccaagaggaataaaaacatactttctcagaaaatttgtaaatgaatgccatactagctttatttatagtggctccaaattgtaaacaaatttaaatgttcatcaactggagatgaacttatagtttgtagaatattaatacaatagtatactactcaggaataaaaataataatttttttttattggaataaggtggataaatcttaaaaacattatgatatgtgaaagaagccaacccacagagcacatactctgtgattacatttatacagagttcaagaatgggcaaagcaaatcagtgttgctggagatgtaaatgatgattgcctatggaggtagggagtgtaaaccaaaaatgaaattccaagccccccaacagactaaatggaccccctcttggccaaggagattacaaagaaacctgaaatccagttcaggctaagatggcaaggagcaggggtaggacatacctcattataccctctcccttttttttttttgagacagagtcttgctctgtcacccatgcatgacaatggcatgatctcggctcactacaaccttcatctcttgggttcaagtgattcttctgcctcagcctcctgagtagctgggattacaggtgcccgccaccatgcctggctaatgtttgtatttttattagagacagggttttgccatgttggccaggctagtcttgaactcctgacctcaggtgatctgcccacattggccttccaaagtgctgagattacaggcatgagccatcacacccccctctcccttttgaccttgagacagaactgaccagcattgacattaaaatcaagattctaagactgacaatacagactctttgtagtagtaagataccaactccaacctgactctggtaagtaccacatgacagataacaggtcctaaaggaaataaaagtattttatcccaaaatatatttctgtgacatattttgaaatggccctgcaaagctgtctcttgtggggaaaatctacattctttagagaatctgcttccctttccatgttttctcctaatccaggagagatttaaatcagagtctgatacttttaagttctgataagagatatctactatctattctctctgaagcctgccacccagagccttcatctacataacaagaactttggcttccacaacccctcttatcttaaccctcaaatttctttctgctgactccaacactttagggaagcttaactttttcaaccaattgccagttaggacatttttgaattcacctatgacctggaagccccttaatttgagatgtgctgtctttctgggtcagacgaatgtaaaccttacatgtagtgattatgtttttgcctgtaacttgtctccctaaaatgtataaaattaagatataacccagacaccttggtacacgttatcaggacctgctgaggctgtgtcataagtcgtagtccttacatttgcctcagaatattttatagagttttacagaattaggcttttttttttttttttccaacagaaagtgactggaggggtgctttctgaatgatgtaactttctgaatgataaaaaggttctaattcttgataggtgtgtatatgtaaaagtttatcgaatggtacagtcaagatctgtgcatttcattgcatgtaaattttccctcagaaatttgaaaaaagaaatgtggatagtctgatataatttatccatgccaagcctacttttttttttcaatttttattataaattttcctttgaaaccatggccaaccacaaaccaccaacctgtccccactctcaatagaaatctcaatatttcaaacagcaaaatagagtgagaggacttggccctcttctatcctcccatcacctccctctggtgattatttgtggtgggaggagaactgctctgttctcccaaaccaccaatgcactcactctgcttccacctatgctgccttccctcattgctccaggaacccgtggaagaagtccaaaaataaatatcctgtttttctcaatgttttaggtagaatcagtggtttctcacttgaaagtgatccaatgtctttgaaagaagctttctttaaaatgcaaatgccattattttctccacagtgaaggaaagaccctggctttcctccccagctccaagtgggctgttctgattgcttccgggtcctgtcctcatggggagcagcaccacgggagactctgcctctgctgagttttctaacattagtgtcgggaaacaagaatctgccactgatgctccttttgtaaaggtataaacatgtatataaaggaacaccccagcacacccttcttgtccttgtcctctttttcttcctctgcttcttcatcctcattttgtctcttctctatgcttgctgcttttctcctttaatttttcttttgtcttcctctgtttccccccgccccacccccactcactgctgctgttttacacttacttggctatctgtggaatttgtttccagaaatattggaaatcaacatgcctatgggatagaacagggctggattacagagtagagtcgacaactttacctcttctagccagaatgaataaacatctgtttaaacagaagtctaggaaccatgaagaactggaggaggttacccaagagctaagaaacaattgggtggagtttggaaaggcagggatttgatagagtgcacaaaagctccagaggaatggaaatcaaatgcaagaagattttggttcaagataagaaaaaatgtaccaaaaggaagacttatacattcataaaatacctgtcagttccctattagcagaagtttttacatttagaattgattggaaattttagaataacaaacatttttaacagcacataagttacacagggaaaatctgaattcaaatgcctcaaagcaggtgcaattttatttatttatttatttatttatttatttatttatttatttatttattttttactgtcatctgctggaaatgtaagtccacaaccaccaagaatactaagatattttccaaagtgacattataaatcagtaaatggttatggaaaaatatcctttggccacgttgctctgagtttagaaacaataataacggtcataatgataacaacaaactttctaagttcactgtgtggtataaaaatacaatggcggccaggtgtggtggctctatgtctgtaatcccagcactttgggaggctgaggtgggtggatcacaaggtcaggagtttgagaccagtctgccaatatggtgaaaccccgtccctactaaaaatacaaaaattagccaggtgtggtggcgcgtgcctgtagtcccagctactggggaggctggggcaggagaattgcttgaacctgagaggcagaggttgcagtaagctgagatcatgccactgcactccagcctgggtgacacagcgagattccgtctcaaaaaaaaaaaaaaatacaatggttttgtttttttaaaacaagatatcacagtatacaacctataaaatgtggcaatttaaaatgtttaatggaaaatggtgtatgtaggcaacttatatgttgctattcaacatttttctgaatgtcctgcccaatgcaatcagacaagaaaaaaaatatataataaggaagaaacaaattgtcttttctttttttgaaggtgatatgtttgtctaattcaaagggaaagaaaataaaaataacaacacatctgacattcatgtccataagaaaagagatcagtaagagggctggataaatggtgaatatttttttaaaacatttccttatacacgagtcacaagtttcttccttaaattctagactcctgtgcaggtacaatgcctgtttaatagcactacttatttcgtaaattattctctctttcttccattccacagatgtttatgtaacccctattatgtgccaggtcttctttgactcactagggattgagtatgacacagataaaaagaaaatcctgcctgcatggaccttcccctccagtggagaaccaaccggactattaaaaatgatatatttttggttaaaatcatgtgtggtatattaggtagtgatgcctgctaaggaaaaaataaagtaaggaaggcagggtgcagtggctcatgcttgtaatcccagcactttgggaggccaaggcaggcagataacaaggtcaggagttcaagaccagcttggccaatatggtgaaaccccatctctactaaaaatacaaaaattagccaggcatggtggcccgtgcctgtagtcccagctacttgggaggctgaggcaggagaatcactttatcccagggaggcggagcttgcagtgagccgagatcacaccactgcactccagcctgggtggacagagcaatactctgtctcaaaaaaaaaaaattaaataaaataaagtaaggaaaacagagagaattgatagaaagagggttatgcttttagatgggatgcctgagaaggtctaggggagagggcatagaggtgtgaaatgcagaagagcattctggatagaagatacaaagaccccgaggcagcagacttcatggcatgctccagtggccttgagggccagtgatatggtttggctgtgtccccacccaaatctcatcttgaattgtagctcccacaattcccatgtgttgtgggagggacctggtgggaggtaattgaatcacaggggtgggtctttcccatgctgctctcataatggtgaataaatctcaggagatttgatggttttgtaaagggaagtttccctgcacaagttctcttctcttgcctgatgccatgtgagatgtgccttttaccttccaccatgattgtgaggtctccccagccacgtggaactgtgagtctattaaacctctttcataaattgcccagtctgaggtatgtctttatcagcagctggacaaatacagccagtgtacctggagtagagcaagagaagagaagaggggtaggagaggaggtcattcaggaatctgggtcactgtgaggatgttgcctttgtcatgagagagatgggatgccactggaagactctgagtcgaggagtgacctgatttctacttgacattcaagacagacttcttgactgcccttcacccacactccaaaacttgctcctttcccggtatttccaggtaacaagtgggttctcttctctcttcgctggtcactccggccatgatccttggagcctttctcacacctctcctcttctgtgacaacacaccaaatccatcatcagatcctgttggccttacctttaatacatagctcatcttctcaagattccatgctggtctaagatataatccactctctcctgggctagggcaagagcctcctgcctcatctccctgttttcattctcaccccctatgctctgtatttcatagtgaagtcacaatgattcttaagaatataaaaatcaaggcatgtcttttgcatgctcagaattctccaaacccttcccatcacatctagaaaaaaacatcagagtccttgctaggtgtgtacagggatccagggtcttgcccattgcctttctgatctcagctctttctattcctgcccagttgggatccagggtcttgcccattgcctttctgatctcagctctttctattcctgcccagttgggatccagggtcttgcccattgcctttctgatctcagctctttctattcctgcccagttgggatctagggtcttgcccattgcctttctgatctcagctctttctattcctgcccagttgggatccagggtcttgcccattgcctttctgatctcagctctttctattcctgcccagttgggatccagggtcttgcccattgcctttctgatctcagctctttctattcctgcccagttgggatccagggtcttgcccattgcctttctgatctcagctctttctgttcctgcccagttgggatccagggtcttgcccattgcctttctgatctcagctctttctattcctgcccagttgggatctagggtcttgcccattgcctctctgacctcagctctttctattcctgcccagtttgctttcacttctgaatccctgaccaacttgcagtttctcaaagaccccaacacattccctctttaaaaccatttcacgtttttttctttgtcaagaagagttcttcttcctgagtcaccagctcatgtactttctgtctctgctcgaatttcacctccttagagaagatagcccctgtgttcctattaaatggtcttcccttatcatcctatttcaagtgggcacatgctccatcatgtaatctatagaatcaatgaactgaccctaaagaatctggccgggcacggtggctcacgcctgtaatcccggcactttgggaggctgaggcgggaggatcacctgaggtcgggagttcgagaccagcctgacctacctggagaaaccccgtctttactaaaaatacaaaattagccagatgtggtggctcatgcctataatcccagctatttgggaggctgaggcaggagaattgctggaacccgggaggcggaggttgtggtgagctgagatcgcaccattgcactccagcctgggcaacaagagcaaaactccatctcaaaaaaagaaaagaattcggtgaaatttttgtgccacttgacaaactaattttaaagtttgtgtggaagaaaatttgcaaaaagaagaatatataaaataattttttttgttttgaaaaagcaaaacaagggaagagttgtccacaagatatgaaattgtagtatggtgttgaagtaattaaatcagcatgctgttggtgctaaaacaaataataaattgaataaatgagggggaaaacacattgatgtaaacataagatttcagtttatagtaagtgtttaagagaggcatttcaaattcatgatgaaatagactgttaagtaagtgatattggaacaaatatctaaccatataagaaaggctaatatcgtaataggtgacattgaacagtaaatgctaaatattaaatcataaactattagaagaaaatatgaatttatgataatcacttggtatctaaaatcttttccaaaacaaggtggagaatttggaagccatgaggaaataagaaatacagagatatttgacctaattgaaacaaaaataaagtactttgataataaaacacaacataaacaaaatttaaagaaggtttcaaactgtgagaaaatgattattccatgcgatgtaaaaagcacagtaccttttaactaataaggaataggcctccccccttgggaatgcacaaagcctttggccaggtaattttctctcgaagaaatagaaaacaatcatgaataacataaaagatcactattatgaatagccatggacatgagaattaatatacaaatgaaatattttagctcaacaactctgcaattttttattgacaatatcaagcatcagtgaacttgtaggtaaataagtttgttcaatataactgcagatgattccgtgtaatagagagagaagcctctcctactttcactccttgacccccagacccacgttttctggctaaaggcagagaaagccccacacagtagtctctgattccaagcatctaatgcaccctgtaagacttaacccatcctttgggggtattctgtccttctgtgctgtcattgagtcttcagagtgcttgttcacctcatgaataggccatctgcttctgggtgatggggtatgcggtgagatcagctaattccctgggtaggagctctttgctgtcctcctttgctgtggaatgagttccctggccagaggctgcactgacaggagggctgtgttggtggagaatgcattctgcgagcccaggatgttggtgatggtggaggcatcacagggtgggaaggcgcagccgtagccaccacaggtgtttctttctgtgaggatgcatctctgtcttgtccgtgatggaagaagtccagtgtcatcaacctgcctccagatggccagctgctccccgcggggaatggtgccacatgggggctcaatgttggtctctgctgctggcagattgggcacccagaagtgacgtgagccaggccagacttgatgagggaagtccatgccaagtgcaggcacagcctccatccctgccaccatggccacggtgtttaggagcccattggacgatgacagggatgactggggaaggtggcagccttgtatccacagaatatgttatcttgtccacctgagtattaagaatttcttccaggtggttgttttttgggggcattcattcacatgggacacacatattttcacagtctgtttccattctgagaggtctatccacaaacctcttcatagccagcaatcttccagtcttgctctttccaaaccattagcaaatgcacacacatcagtgtgggtctgtgcttctagccagctctcactctaaacctaaatactgctcggagctctgctcactgaaataattttccttccccactgtgctccagggtcaccctgagtcgggcaattgtgctccagctgtccactttcaggggtagcaggagatcatgcagctccatcagtatgttcagctgaagttggttcttcctcagttggtgtaagagacaccttgagaagccgtaggcatggctcctggggtcgggggaggcagtgcctggtgagttggagacacctgctcaccttacatgtaccttacagacatgcctggacgccgtctctcatgcaccatttccatttgacaatacattgctgctgcccacacccaatctaccctgggtctcaggggatgaaaaggggtcttctgggtagacagatgtggtgagggaactccaagttggagcacagtcacgttgcaaaaggacaggggtgtgggggcctggtttcgcgtaagacctggctgcaaagttggacaatgaagactgggagccagatgggcctgttaaaatccatccaggctgtggcaccatcatctggacagttaggtatgagggggatttgcagggggtgcggctgggttcaaatcaattcggttcaaatcaattcggacctcttggccagcccttcagtttgacagctggggacaagggacactaaactggagtttgcctgtggtcctgcctgggagcacagggatagcctaggtggagacaggcagggaagcctgtggccacctggacctcttgctcaccatctctgttctcagtagctccgtctcagaaatgagaggtagcgtccaccccatcagctgacccccagcccccactgcagtcatttgaaaccaggtactacaggtgggccaggaggtcagcttttgaggttttgtgagaaaaacattcatacctgctactccctcatggcaccagagaaagtggaatattccatttgtacccaataaaaatacaccagcgttctcatcctaacacaccccgctgaacactctccctggagagcgagatgagcaacctgctggcctggtttgctgagcaggacggtgctgggtacatgcatgaaggtgcaggactaaggatgacacacccccgggcgcttccaaccacttggcagtttgcctcatataggatcccagtctcgtctcagaataagagtgatttcactgaaatttgcttggcttatcctccagtcaggccccagcagcagcagggaggtgctgagccatgctctccttctcccgggctctgtcctggcagctacatcacaactccaaggagagatggctgagtccctttccctgctggagttagggtggtctctgacctctgccttttaattctgggtgagtcaggaggataaattgaggggtaaatctctgtgtaatatgagctcaatttattgctggtatgagtcacacttaggttgcatttaggaaaaaaaaagtaactggagagtgaaaattgaattagatttctagaaattcaggtaaaacaagagaacaaggatgcaaggaggttgggtccgtgagtggcgctgagcagggcaggcgaggctctggcctgtggtcagggaggccctggggaccacgcacaaacttcgagcaagagcgtcaggaagcaagtcaggcagtgtgggcaggatggatctggagaacctggggcgctttaatttcacccctcagctcctaaatgcagcctcaccagagaggggagaaggaaagtttccagatcatctgctgtgttccagtccccttggtagatatttccatatttgataggtcatcgatatggtttggctctgtgtccccacccaaatctcatcttgaactgtaatccccatgtgtcaaggcaggaacctgatgggaggtgattgggttatggggatggtttcccatgctattcttgtgatagtgagtctcaaaagatctgattgttttaagagcggcagtttttcctcattctcaaacaccctccctcccgcagccttgcgagggaggtgcctgcttcccctttgccttccaccatgattgtaagttccctgaggcctcccagccatgcctcttgttaagcctgtggaactgtgagtcgattaaacctctttcctttatgattacccagtcttaagtcttaggtagtattctttatagcagtgtgagaacagacaaatacaatcatccttgccacagtgtctcagttgcttcaatttaggtattattcatttctctttggagtaaactgagggaaagagaggaagtaacttatctgtggacacaccagtttcaggtgaaggggccaagatgacatccaggtgtgtttggctccaaaaatatctctctgcacagctccaggtggcgccttctccctctctctctttctctctttctttctttgtctctccagtattccccaaacatttgtatggacctggaactctcattagtctttttccatctagacctcagggtgacttctccctggacatacctcttccttctctactccttctccaaaatccatcacttggcttaagttggcagaagacacgttcctcctcctccgtgtggtcggtgtgctagaaatacaagcttcctacagttccctctaaatgaatctctccttttaatctcttacatggcccatcatcctgagttctctagcctggagatggataatggatgcaggtgtgttgagaaccgcttctcagcacgttttcatggttggctggtacctctgaatgcaaggtggaggacgtaacactctgagttcttggccgccattctgggagaggacccgtcccattttagtatgggttacacgcacatttgtaccaagttcccactagagcaaactcctccatgctggaggatggtgttacttcatgttggtttttattctgtgtcccttgttcacacagtggggcattccagacagggaggcctcgatctgagtggctggagggttgggttgttctgagcacaatcttgtaggcaggagggggcctgatgcttctgacttctgagcccttgttttcagagagcacaggtagtattgttcagcgtcccagtgtgaaaagtatttttaaatgtactgggtgaggagtacaattgttattcagacacagtctattttcccccttgaaagactgcctctgaacactgagttattttcctgctctttttcagtaaatcaaaggtttcgccatcatgtaaacccttgggcgacagagtctacctgtctccccctgatattgttctatgagatttcgatgctatcttcattgccagcagccctgacaaagatgcactgcagacggatagcctctcaggtgagattagattgaaccctccttatctcttcattgtggtttcatcactttcaggagatgctctgttgtgagaccttgctttgttgttgctgttcttaaagggaacactccctttgttaggaaaatctgacagctggaagccgtgagttcttggccccttgccctgaagcaagagtgaccaggcctctctcctgagggaaggccttcccaggtggggacataggccctaaagtgagaactgaagcattgtccactccctctttgatgccacatgcatggacggttcagtgaatgtcgtgggaactcagctgtgcccacccctgctttgttaccccggcactttgggaaacagcagagtccagcagaaaccactgaagttttgggctcggagggattccagttcaagccccggcttcaccacctacaaggttcaattttggtctaggaatggaacttctctgagtcttagttgctgtcatcaatattattttactgtcatcattatttatagtaaaataataacctctcagactcgataagtctatttgcgtgcctgacacagtgttatgaggttattatgccttatttaatgccaccatcccaggtgggtaaattagtatcattccatttcatagttggagcagctgaggctcagggagattaataatttgtccaagaccccacagctaacaagtggtggttctggaaggaaaccagggtggctgctccaaagctgccatcagcctgggcatctgccaaggtgccgtctctactggggcagccgccacctcccagcacctggagaaaatgtagcaggctagtgagtggggtgggaggtgggcccgtgtggctcactccatgcatgaaaaacccgtaagtgacaaatgcgtacgaagcagcgcttctcagccagctggccgtcactgtctgcagattgcctggcattcgccttctcagaagaatgagtctcagacctcagggttctgaggttctgtgttgatgtggtggctcagctttgcttgggaggtttcagaggctttctgtgagctgggcattgcacacttggcgcctgtttatgtatttaacacttgtggaaatcctttgaggattgaggtcgctggtcctcccttctgagtgtgacctttggggtgaatttgctccagctgttttcaaccttgttacaaagccctgcagggagaggctgagttcagtcagtcccggagggaggggagctgggggcatcagggatgggcctggcagagcagtgggtgtggaggggcaggtccgggggaagccagtgtggggcaggaggctgggcacctcagggctcctcagcttcctccccacccagctccgggggatgcctccgtggcagaactcctgggtatgctcaggacctgctggagtccagagaggccggggtggttttccagtctgcaaagcccatcctgaggtggagactgatgcttgagattctccacagctgaccttctccaaggtggctggggccattgagcccctggcagggcactgggggcctctatgggctgaccagctctgcacccacctcgctccacccctcagctgtgccttatcaggacaaactgctgctagctcccgagatgtccttggatctgtggccttctcgccccacactccctattctggctgtgtggaaccctctccccatcattcctcactgggtctgttcctcctcctccaagtcgctcatggaacaattatctacggaatgctcactcatgctggtcatcagggtgcagtagcagtaacgcaagcagctgcctccagagcccaaatcctccaaagctcctcacccagcccagtgcctcctggctgcaggtagggccagggccagctcatgtccgtaccccacagcgagccttgcttggagcctgacaaaccctccatgaaggtctttgagttgaatggggctagtccttagcaggcaaccccctgctccttgagagccacaccattctctaagctcactctctgcagccaagctctgccgaagggctagaaggatggccaggacccatcccagatacccaagtgatccaacaaggctcctgtgggaagtggggctgggccaggggatgcttttgcaactgcaaactcaatgtgcagctatgtcttggcaactcctgcctgatgctgcagagccccggcatctcacctgcccctgcccagtctctactttcttcccacatggacctctgtgtgtggcatgtatatgtgagtccagacacaagcgcgctctctcacagcacctgtgctgggcaggtagcaaaacctccgaggaatgcgcaaatgccttttttcagctcctgctctgctgactacgattcaatatccatgtccaaatagagcaatgcagttttcccttccttccagccctcctctgaagaagaaagctctttttcctcttcctccctcctcaccattgcttccctcctacgtttaataagctagtgggttacttactgcaaccaccttttgtttcctaaccagaatcaattttctttgcttttctctgttcccattaattgtgattcataggaacttaaaaggctctcatagcagcatttatatttggaagctgtaaatctcagaaagtaactttctcttgggatacatagacacacacacatcctccctgacctgcgaacagcactttagagattacaaagccttttcacagtgactgccacatttgagtgtcccctggccccaggaggggtcagggcagctattcttctcattttctaaataagaagagagacctcttgtatgtggtggcacaagctggggcgtgagcctttcaactccctgctttcctccttctgcccagaaacccggccgagaattagcagcggggtagagggcttccagctgaagatgggatccaacttcctccctacttagttccttgagcgcagccaggagcctctgggaatatcacacaggtgaccatttcagcagcagagctaggactctgttgaatggacttgaggaaatggctcctgctctgagaatttgcagatgtaacatgaccatcaacctgcccagcccaacatgactggacgcacgccacatccctgaggtggtcaaactccttcaaggactatcacagccttttgtggaaacaggattggagaggtcaagtcttttctctgaggtcacactacagctgcatctcagctcagccttagggcctgggcctgtcctgctctggggcccttgcccttgaagtgcagcttggtaaccagtagcacagggctctcctccagctgtcccctcctgctctggtctgagctggtctttttctaccacgtggaaattctggcttgcagattccttcctgcagcagtcctctgctcggagccctcagccactctgctgctctcacaaagaccctctgggcagccctgagagatggcaacccctccagaggaccttccctctcccactggactctggtcatcactggcatgtgcgttattcattgtcaggcctgtattcacccccactgtctgtgctgtgagctccagatggcagggcctgagcccatcgctacccctctacctttatagggctgtttcatatacgaatgagttaatatatgtgtatcagtcagggttctccagaaaaacctcttgctctatctatgtagtgagaggtctatctacatatagagagaaatttattttaagaaattggcttggctgggcatggcggctcatgcctctaatcccagcacttttggaggccaaagcaggtggattgcttgagctcaggagttccagacaagcctggccaacacagcaaaaccctgtctctacaaaaaacacaaaagaataaccgggcaggtggcacacacctgtagtcccagctacttaggaggctgaagtgggagaatcacctgagctcagaagcttgaagctgcactgggccatggtcatgctactgggtggcagagtgagatcctgtctcaaaaaaaaaaaaattagctgacaggattgtggggtggcaagtttagaatctgttgggcaggctggaaatttgaagaagagttgatgttagggtgttgagtttgaaatctgcaggctgaaaactcaggcaggcttcctatattgcagtcttgaagcagaatttccctttcttcaggaaatctcagtctttgcttttaactccaactgattggatgaggcccacctatacgatggacagtaatcacgttactcaaaagctactgatttaagcactcagcacatctgagaagtgcctttaccataacaccaggactggtatttgaccaaagaactgggcaccgtggcccagcaaagtgcacacataaaactttccgtagaatagtgtgtggtgaataggacacattcaataattgtagcaattattagctatctgcaagtgaatactcagtttctactgaatcacttaatagatttaatactttttaaagagttcaaagaattattttttgacatggagaacctgatacaaacttcccaccatgttgcatggcatttcagaacattcgaagacttggtgaaccacagggttccatctgggtaaagaactcattaaggtccccctggttttaatttctatgatgtcgttattttattagtcttcttaggcaaaacaaaaaatgttgtttgcctttttgtaataaagtaacacctagaaagccatgagattatgagcatatttgaggatttctatttggaatcattttatattcatggactttaattggaaagcgtgcagttacctggctggaggtttatctcagccggcttgatacattctctgtgattatgagtgaggaagctgcctggagaaagcctatttttacataatgcagtttttcatggtgtttttgttttcacaaagataaaataattgtggtgaagtggacagagagactcctgcctttttatttttctttttcaggcttgttgtagtagactcttaaaaatgtcaaaacaaatcaccaattttggtatgtttattatactttttctcatctttattgagagaaaacacttttttttaacctgaagaattacatgggtaaatttccacaacagatgtttactaagaaagtatggtgctgacatattctagaataatggcttttactagatgagtggttgatggcacttggagttggcatggtgaaaatgggcctttctaaccagtcagatggtcctccaaaatgcacagaggcaatttgggaattatttaatattgttggaaccattgtacacttagaataaacaaatgcttgcttaaattagacaaattttatttttttaccagtcatttgtggaaatttcataaatacatttcacacatctgggtaacttcctcattccaattatattccttagctcaacgtgaagcctttgcatgactcaaactcctttgaaatggacagaaatgcatcattactctttggaaactttagtagtccctaggacttgtacagaaacgagcaaattctggatctgtttcagtcacaacgctaaagagtgaaataaaacagtgaggaattctggtggggcttgaacaaaagaagtctgaaatttctaaacactatacttggattcaatagttgaatttttatgctgtgcacattgtacattttgtaaatatgtctttaatatgatttactgaaacacagcctaacaactgcagaggatacaggggactggacatactgagcaagtgctgtgctttttctcatttgttaattttagtatgtgctattatgtgtacatttatgagaaatctcaaatcacttttttttttgagataagagtctcactctgtcacaaggttggaatgcagtggcatgatctcggctcactgcaacctccgcctcccaggttcaagtgattttcctgccttagcctcctgagtagctgggactacaggcacgcaccaccatgtccagctcatttttgtatttttagtaaagacagggtttcaccacattggccagtatggtctcaatatcttgacctcatgatccacctgcctcggcctcccaaagtgctgggattacaggcgtgaaccactgcgcctggcctctcaaaacacttttataaagggttgatgctgcctaaaaaatacaaacacaagatacacacaaacacacacacgcacttctatagacagtcttaatgtgaatgccaggagaaataaaatgatccaacacaaaatatgtttcatgttttgcacacattagatgcccaataatcattatcaatcacagaaaaactgaagataccagttgaatatttgagaattgaaggatttctctgtgtggtaaaatgaggcatatgttatttctcgtgtcttttcatccgaggtgtattagcgttctccagagggacaggactaataagatagatgtgtatatgaaggggactttattaaggggcattgactaacaccatcataaggtgaagttccacaataggccatctgcttggctgaggagcaaggaagccagttcaagtcccggaacctcaaaagtagggaattcgacagtgcagccttcaatctgtagccaaaggcctgagagcccctggcaaaccactgctgtaggtgtaagagtccaaaagctgaagaacttggagtctgatgttccagggcaggaagcatccagcatgggagaaagatgaaggccggaagattcagccagtctagtccttccatgttcctctgcctgcttttatcgtagccgcgctggcagctgagtagatggtgcccactcacattgagggtgggtctgcctctcccagtccactgactcaaatgttaatctaacacccccacagacacacccaggaacaacactttccatccttcaatcaagttgatgctcagtattagccatcagaagtccaccccttgtcaccttgaacccatacacagctcctgaaatcatacataatcttcaaataaagacaataataaattcataattacagctaacattatacagctatcctttgtacaacggaaacatactaattcttaacctaagtgctattacataaagttaacgacacttaaatgctgatatgaagtcagtaaatcttatgtgataaaggaaaaaataaaaacatattttcttagtataagtgtatacacgaacaaatacgttcttaaaataaggaagaaatactcatgataattacagttgtcgtttctgcagctggtcatgtggtattaatgactgcttttttctactacccattctgtattccctttgccttcagcaagcacttcagcaggtcgtgtttttttttcttttaacctggtggagtgatgcaaaccttcattgcttctgcgccatttgccatcctgcctggattgggttgttgtagtttcctgttgaccttaatcacagggcatggggaagggaaggaagcattttcttagatacctggaggagacagcaggcgttgtaagattaaaactgtgatattgggactgtctcaccatcatcatctttgcttctctatgggatcaagcccaattctttgactcctccttttgctggggacagggactccgacagcactggggtagcatggtacagctcacgagcagggaaaaacacacctgtttctccagtgtgtcatgagactagaggaggcttcctgtgagctgctttggtcacgtgtctaggaggaatatggtgttatgacggccagcatgggtcccctgcatgcttctatggaccattgagtagggaggtgacacagtgaaattcacagtcctggcagaggcactgttaccagaaaagggatcggatcccaaccctaagagagggttcttggatcttgcacacaaaggaattcaaggtgagttgtggagtacagtgagaagagatggtttattaaaaactattccattacagaggaggtcatccatggaaagaaagaagaggaatgcaccatctttgtctgaaggtttccttatgtaggagtcttgtctatgtaaagactaaactaagctgtcctatatgtggatgggcaggcagcatgacaaaatttagtagtttattaatgtaaagaaaactatccttgacattctagtgtgtaagtacatcaaagtgttaccgtaattatcttgaaagcgtatatcgttatgggtattgggacatctgggttttctgttgttggaggggtttgtccttgtaggcattagcaagctgcttccttagctgtaaacatctaaggaccatgggtggtgactgaccaggaatgtgccttggcgagtttcaagatggaaggccaggtgcggtggctcacacctgcaatcccagcactttgggaagccaaggcaggtggatcacctgaggtcaggagttcaagaccagcctggccaacgtggtgaaaccccgtctcttctaacaataccaaaattagccgaatgtggtggcgggtgcctgtaatcccagctacctgggaggctgaggtaggagaatagcttgaacccgggaggcggaggttgcagtgagccgagatcatgctattgcactccagtctgggcaacaggagcaaaactccatctcaaaaaaaaacaaaaaaaaaaaagggtacaagatggagctgaacttaaaatggtgtcactctgactctcctgggctcctgcttccataacagcaccaaagcagagaatcaggggcaggaggcttttcggcaaatcaaaccacagatatccccttccctagcacctctgcaggccgcagcagctgctctgtggagagaagtgagttgagcactgaggatctgcaggtaaggagctgaagacacttccctgccattcggggttttgcgtcctataagaagagatagacataaagagttaaacagtgggtttgaggctattttgtttgtttgcttttttgagacagagtcttactctgtcgcccaggctggagtgcagttgtgtgatcttggctcactgcaacctctgcctcccggattcaagtgattcaggcacgacccaccatgcctggctaaattttttttttttttgtatctttagtagagacagagtttcaccatgttggctaggctggtctagaactcctgtcttcacgtgacccgcctgcctcggcctcccgaagtgctgggattatagtcttgagacaatatgtcggcccaaaggctattttaaaagactccatgagcaaaaagacgcaaggaagagaaaccgggtgagctgggaggtttgctcaaagagcaatgtgactccttggcacctgcagggtgaatggaggtttgagaggtgaagaaaataggtacattgttcagggtggggatgctgtgctgtggtgacaagtaataaactcttagatgcttggcacaaaaaagaatggatccgcttatatcatacctctaagtagtttgtgggtaaaggcagtggacagtcctctatgcagctattcagggactggggctccttctgtcctcctgggatggagctagtctcaacacacagcctccagggttgccatggaaggggcagagggaggaggatggacgtggagctttgttgtaaggcaggccatgaaagactcatattatttctgtcctgttggtcaaaggtgatcacaaggccccacttggatgccctgagtgtgaaatgtgttcttcctgtggacccagtggcggggacggtagaatttagacatgtgctgagcacttggcattaggtctgaaaaagtcaggaagagcatttcaagcataggaacaaatgaggcaaagactcagaggcacaaaagagccagatgtgtaggtggaaccctgctgtgctgatgtggcagatggtaattgttgaatgagaaaaaaggaagacggactggaggaggaggagggtgcaggaaggtaacagaccctgcgggcttttcctctaggcagtaagtagttggcaacggaagtgttggagcagaggaaggagtggcttgttttgatctaaggatgagaattctggcggcaaggtatgaaggagaaggttggaagtggcgagctttttaggagcctaacacagaagttcttgtaaaggaaaagggtgtctggatttggggtataaatccagggaccatggggtgaacatgagcagatggctgtgaaaactttcagttcgggagacaaattggatgctggaatgttccaggaaagggtcactgtggagttacagaagaatggataaaataatgtgccctagtccttcatccccaagaagtaccaagaaaaaaaaatagcaggaagatactcagaggtgatgctgattagcggctatagccattgacccaagatgaaaggacgagtttgatcttctcaggttgctggtatcttggcgctcctgcatccgcttctaactcgcggagatagttcatcatttcccacggcttaaagtacagtcttcatactgccgactcctgaatgtctgtgtttggctcaggtctctcccatgagctccaaacaggtgtttgcagctgcctagtagaaaattccacttggatgcctcccaagtagcatcaactcaatctgtcacaaacttatctcagagactttccttttaaacccaggctcaccttcctggagaaatatcccccccgcttcccagttgcttatgccaaaaactggagagcgtttttcatacgaacctccccttaaagctcatattcaattactcaacacgatcaatatttccttcccaaatcttttcttccacggttcttctctccatcaccactgccaacaccttactctaagccaccctgactcctcactgcagcaaccaactctcgggccacttcacctctgggtctccttaaggtattttctataatacagccaggaagatctttttaaaaatggaattcaacaattcaaatcatgctattcttgtcttataatcccttaagagcttccctttattcctcagttaaatctcagatttgtagcctgccctggaatgtcctgtctgacctggccacgctaaattttcctccatttcgctccatgatttcctctggatgcggcgccagcaattagctgaccttccttcctttcccaaatgggccaggtccttccagccttatatccctcgcataggccagttcaaccgatggcttggaacactcttcacctcccacccagggctccctggcagcgtcgccaccttcagagggctgtctctgactgtccagaccaagacaacacctggaatgctcttccttccttagcatgtcctacttaaggacaactgcaattaaaagtacaggtcaaagttgtgagggaagtctttctgttgagggtcaatgcagtaaggacagggattagaaataagttttgctgtcattaaactctctatttgaaaactatgattgcacataaacgtgtttagtaaatgtttgcattttatattttcggacttaaagcaggactatatagaggtatcatcttggttagaaaattggttccatgaacttcccagtatacccaagaccgtatttcaaaattggaatcttcagcacatcatgagttttcagcctttggggctcaagggaggcagcagagccagggcatgagaacctggagtcaggccagatggcctcattccaaatccctgctctgccaactgtgtgacctgaagaaaatgtcttaacctctctgtgcctcatttattttgtatgtaaattgggggaataatagtatttataccataggttggctgcaagaaggaaataaaataattgatgtaaaatatttagaactgtacttgacatatactaattggttattctgcgttgttagtgttgtaataacgattagaactagtaatcttctattattgtaatcctcattttggctatgttatttaacaccatatatatgtcatcaagatacataaataacaaaacatgaggcagaaggaggttgcatgcaattaaagggctacaagggtctaacattttcttggagctgttaaggtattaatttaaatttgactctaagaagtaaataatgaaattaaattaaaagtatagggaaaaagctagagaggggaaagaagaatgatgaaatatatttaattcaaaagacgtcaagagactagttaaaaaggaaatagaatgtgtggaaaaaataaaaaaaaagtagacacaaaatcaaacatgtcagcaattacttttaatgtagaagaactaaaagcagcaatcaaaatgccaacattatcaggctggataaaaaccaaaacaaagtaaaacctaaatgtataatctttacaaaaaaacacacattaaatatgaaacgttaaaggtaaaatgatggggtaagttacctctctcacaatagtaactgagaaagctggtagagcagaacacagacgaagtagggtttagggcaagaacatttattaggaatacaaagggattgtttccataatggtgaaagagttaacccacaaggctgtggtaaaaatattcaattgctagtgtctaataatatagtttcgcaaaaataaagcaacattcaccaataaaaggatcaaatacataaggcagaagtcatagtggaagatttaacatagttatttcaataatgaataaataagtgaacaaataagaatacagaggatttcaacaaggtcaacacatttggcctgagtgggatacacagaaggctgcctgtagcaatgacgtactcacagttttcgagtgtacccggctcgtctacaaacactgacttcagctgggacagaaagcaagtccagaatttctcaaagaattgacataattttgagtatggacaggaaggtgaccaggaaatgctaaatatttgggatgtaagcaatgcacttctaaatagccatgaataaaagaaaaacatgacattgacaatgaaacagaaatatgttgaattaaatagtaatacaaatacaaggtacaaatgcgtggaatgcagctaattctgtgcttagaaagagacgtatgcccatccatctggatccatatctagatacatgcctatatctagatatttatgcttagatattcatgtctatatttagctatagaaatagatacttgaaacaactgtttagacgtctaaatagagatatatatatgtagatacagaagatttgaatatgattaacaaacaatctaaatgacacatagagaacactccatacaaaaaaagaccagaattcagttttgcatttacctacatacctatctagtcatctgaatatgaatatttaaaaatcaaaggaaaagaacaacaaattaataccaaataaagtaggaaggagcaactaacaataagaagataaaagttatgaaattaaaatttaaaaatacaaatatgcaaagaaaatcaatgaaagcaaagctaatatccccaaaataagataatcattaaactcttagcaaaactaaagaataaaggtgagaaggcacaaattgctaattttggaaaagaaaaaggtataatcactgtagatccaatagatatcaaaaaggcacagggaaaattataaacaactttttaaaattgatatgaaaatttagatgaaacaaacacttctacaaaacataaaacttactaaaactgactacaaagaaatagaatattttaatatttatgtatctattaaattatttaaactaatttttttaagacaaagtttttttttgttcttgtttcccaggctggagtgcagtggcgtgatcttggctcactgcagcctctgcctcccccactcaagcaattctcctgcctccgcctcctgagtagctgggattacaggcacctgccaccatgcctggctaattttttttttttttgtatttttagtagatacggggttttaccatgttggccaggctggtctcgaactcctggccttaggtgatccacctgcctcggcctcccaaagtgctgagattacaggcatgagcctccacacccagcctatttaagctattttttttcaaatctctatgaactcaaagttttacttataaaatggaccaaatataaggaagaaataacagaaaacttttgcaacatcatcttgggaacataagaaaacaccatcaaactagttaataaggtcaacataaacatgtttccaaaacctgacaagagctttacaagaatgggaaattacaggcaaatttctcaaacttagatgaaaaattttaagcaaaatattagtaacccaaatatagcaaaatctaaatagtacaatataacatgaagttggatttttccatcagtgcaaccttggtttgctattcagaagtcaactaatgtagttcaccacagtgatagaataaagagaatatcatgtttgatcatcttgatcgatgcagtgaaaacattggataaattctatactcactaaaagtatgaagtagaaagctatggttcaaagaaaacatttgaaagcaaatacattgactccacctaaagtgtacaccaatacttctgcttcctgtggatggaatatcaagcattagacctaatttctcactataaaagtaagtagaaatttgaaaacttaacatttgaaacaactctttccaaatattgaacaacaggcagcccaggactgtgattccaaagataagagaagtaaaggcttgtctcgcatgtgccatatttcttcccgaagacaatttctgctatgtggatgtcgtaatgagaaatgcaaaagagtctgggagtgtcagaattaagtcagtaaaaggctgaggcatctaaactttgcagagaagtgctatagaaaaaagcagaaaaagtgcccaggagtctatatgggagtcaccgtgggtcttggctgagtatcagtcatgcatgcatagagtgcaacttcatagagccaggcaaaggatccccgaggacctattagtttaacatttctgagaacccacatccgagaggaagatattcaagttccaaccagctagaagggagggcctcagaggttacctggggtagtcagtggaaggctctgtggagctacaccttagcagtcaggtggaactatccccatactgaaggttcctctccaccttccccagcaaagcctaaaatggaaccggaatggatcagactggatagcagataacttgattttctgcaaagtagagtaggcccaacattctcggaaggaaaacaacacacacatcaccatgtcaggcattcaaccaaacgactaaacatcccccaaagccagaaaatgtgacacgcaatcaaggaaagagtcaataaatcaatcccaggcactacaaaagtgattgaaaagttgaaaagaagcacattaaaacacctaccataaacatacccagttatttttaaaaaagggatatataaaaatgaaacaaatcttctaaacattaaacatgtatctgatatgagtctttcagtggatcggattaacaatgggtttgagactacagtagaaaatatcagtgaacttgaagacagacatagaatgtatgcaaaatggagtaatgagaggaaaaaaagaaagaaaatgagcctaattgagctaggggcaatattaagccatttaacctacgcaaatttgtactggagaaggggcagaagttcaaaaataaatttgaggtaaaaagggccaaaaattggttaagtttgatgaaaatgataaactttcagatgaaagaaggtcaatggaccccacacatgaaaaatacaagtgtgcatgcatacacacatacacaccaagacatatcataataaaactgttgaaaaaaacagttataatgagaaatagcttaaaagcaatgacacaaaaggccaataaaatatagagcaataaagataagaaaatcacagatttctcatgaaactgcaagctagaagacaatggaacaacagatttaatatgcaggaagaacaatgtaatctagaatacaatctacatgcagtgaaaatgccctttaaaatgaaggcaaaacaaagactttgtccaagaaagaaaagccgaaagcattaataatctccagcagacccacactaccagcattttattgaaagttctttagaaggaaggaaactgatactagaatttgacacaaagaaataaagagcaacaaaatggtaaatgtgccctaaatttgaagtattttttcattgtattaaattttattaacaagattattggctttttttttctttttttcttttttgagatggagtcttgctctgttgcccaggctggagtgcaatggcgtgatctcggctcactacaacctccacctcccgggttcaagtgagtctcctgcctcagcctcccgagtagctgagattacaggtgcgcaccaccttgcccaactaatttttgtatttttagtagagacggggtttcaccaggttgtccaggctggtcttgaactcctgacctcaggtattccacctgcgtctgcctccgaaagtgctgggattataggcatgaaccactgtgcccggctgattattggctttttaaagcaaaaatgtggggtttgtaacatatggaagtaaaatgtatgacagaaatagcataaggtggtgtcttcgtaagtatgtttacataaatgtgcaagtattcattaaagggcatattttgatcatgacttttctgtatgctgtacataaaaaactttgcctaaaaccaaaaagaaaaggatactgcagtagattgtcttactatttaacaatatgcatcctaacgttctcacctctctgggaggaatttactttatcgatatattcatggtggatttggccatatgatttcctttggcaagtggaatgtgagaaaacatgacaatatgccagctccaaacagtggctttataatgtaattcaagctcattccacatctcttgagctcctctctctaccatgagagcagcaatatacaggttaaaccttccgtctgcaccctggactctagggaagacctgaaactgacaccaacctagagatgatcagtcagagcatatgcacaggcccaagagtgaaaaatgattatagttttaagtcattgagcttttgcaattgttcattatgaagtattgttgaagaaaaagctgactgatacagaatttagaataaagaagtggagtgctcttgtaacagaaacctaaaatacactgtttcttggtattgttttgcagacagggcagcaggtagcatgggaaccataaaatgaatctgaaaaattacaacctatattgtgcagtagtaaaatatttggcaaagtactagcctgtagtaatttataaggaaaaaaaaatgaggctaggggctgtggctcacgcctgtaatcccagcactttgagaggccgaggtgggtggatcatgagctcaagagatcgagaccatcccggctaacatggtgaaaccctgtctctactaaaaatacaaaaaattagccgggcatggtggcgggcgcctgtagtcccagctattggggaggctgaggcaggagaattgcttgaacccaggaggcggagcttgcagtgagccgagatggcgccactgcactccagcctgggcgacagagtgagactccatctcaaaaagaaaaaaaaaagaaaaaaagagagaaaaaaaaacctaatgaatttgtgactctgggcaaagatatttcaggaccgaccatactagtgccagttaagcattattagttgcatttcacagggctctactaggaagtcataagttaagaaaacaactggccattttacaagcagaaaagaaagagaatagagaaatctgagatgttcttggacttggcaagtttagagaatgggtttgtttctaaacacatcaggagtggtcagtcattaaggccacgaatctcctatcttgttaagatacttgattgggtaaaagtggttcctggtgagtcctttcagttagaataaatgtctcaagagtgtggttcctgagatgccagataagttcaaagtacctcctgtaagatttgaggtgtaaaatgacctttgagacccacatttctaaaggcagaaaggaggagaatgctgtttagccaaccccagggcatagtttccaaagccttcttcagggatagttttcaaacgccttcttcagacatggcctagaaagataaggataacagggctgggcacagtggctcacgcctgtaatcccagcattttgggaggccgaggcgggaggatcacgaggtcaggagattgagatcatcctggctaacgtggtgaaaccctgtctctactaaaaatacaaaaaattagccgggcgtggtggcgggcacctgtagtcccaactactcaggaggctgaggcaggagaatggggtgaacccgggaggtggagtttgcagtgagctgagatcacgtcactgcactccagcctgggcaacagagcaagactctgtctcaaaaaaaaaaaaaaaaatagaaaaagaaaaaaaaaaaagaaagataagggtaacagaaggaactctttgaaggagaagccaagagcgatggagaacaatggaatagaacctcagcctaacccaccaacattctttacctgacaatagggaactgtggaacaccagccacctggatttcggaattgctatgggccagtgactgcagggtcctccctattcttccccattccaatagaaatgttcaaggcagttgtcctgctctatgccaccattatttttcagctctgtgagaggaacatatctttgaaaaaaattcctaggtctccagaccaagagaagtcccactgagacctgatgaaaaaattgtaacatttgagctttcaattgccgcacctggattggatgattcttttgaagtgttagggagaaaggaaaatgcatacttgtgactgttcagaaaatatgcactctcttttcccagcactctgctccactcccctgccccagaagggtgtactttcctgcatcattgatattggacttggtaatttgatttattttggccagtagaatgtggggaaatatgacagcatggcagttccaaaacaaggttctaagagactttacaagtctccagtatatattttgtattctaccatacaccgcaagaatatcacagcacagaccgtgtctgattcttcagcttgagtcctagaatcaaaagccacgtggagcttgcctgaacttcacctctgcctggagctgagaagttcatgtgaaataaatgtttgttgtttcaagctactgagattcaggagggtcagttgttaagcaacattactgcaagaaaatctgagtagttcttccttatctatgggaatatgttgcaagactcccagtggatgcctgaaactgcagataatacagactctacatatactatgtttttttcctatacatgtatgcttatgataaagtttaatttatagattaggcacaataagaaattaacaataaaatagatcagttatagtgatctactgtaatgaaagttgtatgaatgtggtctctctcgaaatctcttactgtactacaccctctttttcttgtgatgaggtgagatataaaatgcctgtgtggttagagaaagcgagtgaatgatgaaggcattgtgacaccgtgttaggctactgttgaccttctgatgtcgggaggatcatctgcttcaggtgatcctggatcattgagccgagacaatatccatggttggatggtagcagcagacaatgtcaatgactgactggtgggtagcatgaacaagctggacagaggggtaattcacgtcccaggaggcataaagtgggacagtgcgagattccaccacgctactcagaacagtgcacaatttaaaacttacgaagtgtttatttctgaaattttccatgtgatatttttgggccatggtaactgaactgtggataaggggtgactgcaatagtacaggtaaacaacaaatggtgctgatgagaatagctagtcgaaagaaataatcctggctcaacactgtgcagcaaaacatacacacgtgttaaaaatggagcatgtttaaagcaaacagaaatgcgagtaaaatatggatgcaaataaccagctgatatcagagtataaaaggcatttgaaaggaataaattatttcaagaaatcaaggagaaaattaaaataggttagcctcaaaatatttaaccttctgaataattgaaaaatattaatgaaattaaaattcacaaatcatggaaatgtttctgaaataagtatcatctaacccatgctttagggaacatgagaacggaagaggtaaaatcactttcaggtctgtatgcagagggtaggtagaacctaaaactgaggtccatgctctgtcagcagacatcaggataattattaatagaagcaaaacacctagtacctagagactagtcctcatccctgtggctcacgacaaaggttcctttaggttcctgatgtactaggcactcaactgtctttttgacagggaaccagagttatcatatattaaattccacatatgcaattgactgcccagcacaaattacacctttcagaaatgtcattctgttgaatagtgaaaagctattcccagggtggaaaacattgagatttgttattacagacagggattggaaaacaaaatattgtgaaattaagtgtgtcagattgtttaagcacaacaaagatgataccagaaatctcattcattgtcattcaaatctccattttcaatggagtctagagaagagcaaatagctaggtacaaactccagttaccccagactgaactaaataacatatcctgaacaatgagcccatgggaggtatttgtgaaatacttgagaacctttcttattgtgtttggtaactttgaaaagcagatgatacagcaagcaccactttactttctctacattaacttagagattttctcccatgggcttgaagaatgagaccctctgtgcaatctggccagggccctggaaattagcatctactgtagatgacccatgggccaaggcacgtgggagcccataggatggagggaaatgagaaggtgaggcagagattctgcctcctggtgttcatgccgttgtataatcccttcctcttcaatgaggcaaatacaatgtaccagcaaatagaatatggcaaaagccatggagtgtccctcccaccattctaacatgggtatgcaaatctccgtcttatccttagaccacacgctttctttgctggctagatgaccttagcaaccttaccggggaaacccatgtggcaaggagctgcaggtggtttctaggagctgcaggtggtctctaggagctgcaggtggtctctataggagctgcaggtggtctctaggagctgtgggtattcttgaggagctgcaggtggtttctaggagctgcaggtggtctctaggagctgtgggtatccttgagaagctgtaggtggtctttaggagctgcaggtggtttctagcagctgcggtggcctctgggagctgtgggtggctccaggagctgcaggtggtctctaggagctgcttgggggcctccaggagttgcggggggcctccaggagttgcaggtggcctccagcttacagcaagcaagaagtcagactgcagtcctacagtcacaagaaacggatcctgccagtgttctgagggaggttgaaagcagattcttcactatcccggcctccaggtaagccccagctctgactgatacattggttggttgcagagttatgagaccctaagcagtcatggcccagttcagccactcccggactcctgacccagggaacctgtcagatggtgagtgtgtgctgttgaacccatcaaggtcgtggtggtgacgatgtagcagcagatggttaatacaaaagggaagagaagcaggagacccggcaagaaaggaaagggtggggcagggcagaccaatctccttttttgcattaaaattaaaaggcctgtgacttaattttactgtgagtgagatgaggattttgagcagaggagtgatacgatctgatctctatgtattaagaaacactgtggctctgtgacagggacctggctgagttactggggaaagaaatgctgggattctggatctactgtgaagggagggtgaagggtatttggatgatgccttggttgtgggatgtgaataataggaaagttgcagttgactccaggtttttcagtgtgagccactggatgaatggatgggttgccttctactgctgtggtgaggcggttttgagggatgggagctgacagccctatgtggggcataaatggccatcccagtggagatgacagccaggcagacccactgtcaggactctgcagttccaaggggaggtctgggctgcagacgctctggggttcccgaagtagaaacgtcgcataaaggcaaggtacagtcagtacttggggaagtgtagctatgagcatgcaagttgatcctgagctccttggaggacggtggaacatgctgacaccacaaacagagttgaaaaataggggtctcatgtgcatcccttttgtcctgcttggtttcggtgtgggtggaagtgtgctctccatggaccgcaatccttgaaaattctggcttcagttttgctcaccagatatcacccctctcctcaccatgcctgtcttcccaggagcactatttcaatgagaagctgggagctcagaagctgagcgggggatgtatcactcttaggtgaaagaagggggaagaaaaaccagaaaaggtcctctttgccccaagtgctttgcatgcattaaatctaaggagacaggtgtctttaaatctggattcttaaatcaatcacttgctgccaacatgcttccgtgttcaaagtcagttaccatgcgatgcttctgaaaatagacctgtgctgaccaatcatgactcttatataagatttagtactgacttaagcctgcaccagccaggaatgtgatgtgacaagctggatgggagcaactcctggtgatggatttccagccaaatgagaggtgactctctgggtacacggagagcacacctcagcaggcagggcctggctctggggagagttggtggcatggatgcacagagcttcatggggctctcatgagtcctcctgagcaggcaccaggaagcctgttagtcgcctcacagcttcgatgtgggctgtggccagtcagaagcaaggccagcagcaatgaaccaggagagagcagaaagcccctaccggagtccagcttggtgggtccattggccccaacaaatggctctccccagccacatcctgtccaggactatgccagggtcgtaggttgattccctccttcagggccatgggaacatggacaggatcaggaaggaagttagtcccatgctccttgctgaccagaggaagagacatagaacattctccaacccaaatgtgggaggaagcctgagtggggcaccctcacagcctctgcaggtagcaccttggccaacctccttctgcagagacttccctgtccttgtgccaggcttgacactgaccaaggcaggtggggcagaaccaccccaggccatgctgcaaaattctacaccaaacgtcccagtcctgttgggtcagccagccctgagttcttagccccgaccactgcacctcccccgcagtgcccctcaggtcctctgccagcaggtgccagcaggatgtctcaagtgcagctcagatcactgtgctctgcctaatatccccacttctcctgtgttgggtcctgaatgccttgccttctccttgggcagaacactgatccattcctgctcaccttggaggcctcaacatgcacagcttcaacttcaacatcttcattttcatcttcttcttcttcatctttatcttcatcttcattttcatctttattttcatcttcttcatcttcatcttaatcatcttcttcttcttcatcttcatcttcattttcatcaccttcatcatcttcatggtccacatccagccacctggtttaccagagagtgtccccgaatgagtcctgccctctcctgctttctgtaattactgaatgaccccaagtgggttggttgatgtctctgggcctgagttacctctttttactgccgggatgattgatagtgtgtaacttccagggttgttttatgatatgaattagaaataatgactgtagggctgggtgcggtggctcacgcctgtaatcccagcgctttgggaggccaaggcgggcagatcaactgaggtcaggagttcgagaccagcctgaccaacatggagaaaccttgtctctactaaaaatacaaaaaaattagccaggcgtggtggtgcatgcctgtaatcccagctactcgggaggctgaggcaggagaatcgcttgaacctgggaggcagaggttgtgatgagccaagatcgtgccattgcactccagcctgggcaacaggagcaaaactcagtctcaaaaaaaaaaaaaaaaaaaaagaaataacgactgtaaatactgcttagcctagtgcttggcgtacagtaggaactcaatgaaagggggtcattactattggctgctcagcccccctctctgctgtatgtggctgcctctttatttgtactttagtacttggcttagagaaatcctcctgcagggaggcttctctgatttcatgagactgaggtgggcttctcccatggcctcccacagcctttgcgcctctctcttgtgcagtccaggtgacatggtgtcgtgattgttcactaatggatcagtcttctcaccacagggggctggagggcaggggccattacttttaagactctgtgcaacacgctgatcagtcacaaaatgcatgtttgttgaatgaatgaaagaaatacagccagctgtccctgctcgatgagttgctccttggttgacctttcccctatgacacgacctctgaggatttatgccgatctccagacgtacaggatggttcacctggtttctgctgtagcaaacatgctgctagctggagtttgtttacggagagactgtcttagaaggggagtctctgagtggacacagctgaattgtggacctcatttgggtgtttccttcattcattcatcgatcctctacagaacataaaatttgagtcagtgtggtgcccagcacaaagtgagtattcaacgggttttgactcggtccaattcattcctgcttttataattttcttttttttgaaggtggagaggcgggaaggtccccagtgtgttcatgggaacgcagggcatgcctcactgcctttggacttgccgctccctgggttgggagggagacctctctgacagatgcccaccttatgttctcagcgacatttccctcaccattccctctaccccttttttttaaaaaaaaaaagagacataactcatatactgtaaaattcaccatgttacggtgcagagttgggtgggtttcagcggatccacagggcagtgcagctgtcacttctctctatgtctggaacattcccatcaccccagaaaggaaccctgttctcttaagcagcgtctacccattttcccctcccccataatcctggcaaccacaaatccactttcggtctccatggatttgcctctcgttgacatttcacataagcgggatcattctataagtgagcttttgtgtctggcttcttccactcagcatcgtgttctcaaggttcatcagtttggaccaggtgtcagtgcttccttcctttttctggctgagcaatattccgttgtgatttaagggaacatgaatacacagcattttctttatttactcctccattgatggacattgggttgctcccactttttggctcttatgaataatgctgttatccctatttgtattcacatttttatatgaacacaggtgtcagtatctctgtgcacattgtagtgtgacatctggtaacttcgtgtttgacatttccatgaagtctccaccaaggctgcaccatttttccattcccaccaacagggcgggagagctcccgtgtcttcacatttttgtcaatggctactattttctggatttatgtatttacttattaattgtagtcctcctaacaggcatgaagtggtgtctcattgtggttttgatgtccactccatcttaacgggtaaacttgctctaactccttacccaaatctctaaaccatttgtcaccctctggatttgttcatctgtccatccatccatctgcacacacatacacactgtatacacatacacactgcacacacatactgtatacacatgcacactgtgccacatacacactgtacacacatacacactgtatacacatacatactgtatacacatacacactgtacacacatatacatagtatatacatacacactgtacacacatacacactgtacacacatacacgctgcaacacgtactgtatacacatacacaatgcatacacacatacagtgtatacacatacacactgcacacatatatatactgtatacacacactgcacacacatacacaccgcacacacacactgcacacacatacatgccacacacacactgtacacatatacacaccgtatctgtgtgcatcaggatacatcaggaatgcatttctctggcccctcctctccactcaggcccctctgcaccttgaccatcccatgccacatttttccactttgcattccacattccagcccatcagaaccaccaacaattccacacttatgccccattgaagtctgaagatgcccaccctgtgcttggctcatcattaccccccaccagcctgcaaagctcctgcttctccttgaagaaacatctgctctggccatgccttgacaaagtggggacctgaccaccaaggagggaggggaggaaggaggacagcatttatccatcatctgtgtctggccccatcccagggggatggagtgcgggcagggttgcagtaggaaccctgatcacaccttggtcttcaggctcttgtgggtgaaagaggctggcacgtacccactgaatccaggcaggtgttcgggagtgggcaggtacactcagcctgaaatgatgggtgtattttgcagaaaccaaaagggatccctgttgggaaaagcctgaggaaggtcgggagaggcatggggcgagctgcagatggttggaggctcttggggagaagttgtgggctggtcaggtttgggagggcaggacatgaggttggaagacacgtgtctttgatctcccaaatgtgtgttctgagctcaggccccacgcacatggcttcccagttgacacattcctatttcaacatgaatattttaataaggcagaaactttcatttttctctctttttaaaatcaaatccatttcttgtgatttattgatttttttttaaagtaaatcaattttttcgttttcacaacttattaccagatagtggggtctggaacataccgagcaagaattctgttaaaagtatttaaaagtattttcaaatcaaatcgataaaactacatggatatgttttttaatattacaaagaacaaatgtggaaaagttaatcaaaacatgctatttgacaccaacacgtagaacagcacagctttgatttgaacagatgttctaaaccatgaggactgtgcaagagaaacttaagaaaaataagcataagcctctctgatacaaaaacaagcagactcggttctgggtctgggtaagttgggttaaacacactctccaaatggctacacctagaaaagctggacagaatacatggaacaactatttaaagaccctggaaagcgaacagcagcaggaggaaagaactcccaaatccaacattccaccagattaatgcagtttactctgtcccctacctgatctcttcaagtctgaactcaatgccctagaaacccagaaatggacaccaaggtgcaggtagagagaattccaggaaaaactctttctttatggcccaagtagcaggaaaacaaactcccatcagaaatccccattttcctttttttttttttttgatggtgtctcactctgttgccaggctggagtgcagtggtgcgatctcggctcactgcagtcctcaactccctggttcaagtgattctcctgcctcaccctccccagcagctgggattacaggcatgaaccactacgcccagctaatttttgtatttttagtagagatgaggtttcaccatgttggccaggatggtctcgatctcctcacctcatgatctgcctgccttggcctcccaaagtgctgggattacaggcgtgagccatcatggcaagcctagaaatccccattttcttttcaatgttttccttctgttctctctcaccacaaccccttaagcaatcacgtggagatggtggcagcagagagtgatacgcgcccacaggtgcagggcagtcatcctctccgtcctgcagacctggtgttccaggaggcgaggctgcacctcacacatcctcccctgggtgcttctgagctgcatgaccatggacgaagggatgactgcagaagtgctccacagaacagggtaactcacatcccaaatttccagccagaggaacttgggaaaggctgtttgcagactcccgggctcacggttcccctgtacacacaaagctgtgcacacatgggtgttgcctcatggagcatttcaaacgtcatgaaggttaaactgacggagcactcacagaccgagtcctaggttggcctctggatggccacttgtgggacagatctggacagaaatgcaaagcttggaaagtggagctaaccataaaaccacagccagtccagagaaggcacgttggaacttgtggcctgggtgtgagcaggttagctgcctgcagaaacaaacactgggcattgctcattctccctgcctcataacataccatccagaatgcccaggatacaatccagaattacttggcatgtgaggaataaggaatatcccaattctcatgggaaaagatggtcaacagacaatgatactaagatgacacagctgttgcaattatctgacaaagacattaaaacggtgattattaaaacattccagccaggttcattggctcacacctgtaatcccagcactttgggaggctgaaacacgtgtacagttttgagctaaggagtttgagaccagcctgggccacatggtgaaaccccatctctactgaaaatacaaaaattagccaggtgtggtggcatgtgcctgtagttccagctacttgggaggctgaggttggaggatcccttgagcccaggaaacagaggttgcagttagccgagatcacacaactgcatgccagtctgggtgacagagtgagaccctgtctcaataataacattccaaaaagtcattgcaaacacattcaaaatcaatcaaaagttagaaaaggaaaatttaagtcctgaaaaaagcgtgcatgcatgaacgtgcacacgtgcacacacacatactcacacagaaacctcatggataggctcaatagcagactggagatgagagagaaaagagttagcaaactcaaagacagaccaaaagaaattatccaatctgaaaaacaaaaagttggaaaaaaaaaatagactaagcctcagggacctgtcagagaacaataaaaggtctagtattttttcactggaatcaaattgaggtgagagtgtgatgctaaagaaataaataaatacataaaaatttcaagaaaatttgctgaaaactctttacattttggaaattacctaagccaccagaatcaagaaggtcagcaaaccccagagacaataagcccaaagaaatctatgcacagacacatcataatcaatctgctgaacactagacacacacaaagttttgaaagcagcaggaaaaaaaaaaaagatgcattccctaaagggagaaagcaattcaaatggctgtgactttcttatctgaaaccgtgggggtcagacggaagtggcacggcgtttttaaagttctgaaagacaataattgccaccccagcagtatatatccagagaaaataccttcaggaataaagatgaaataaagacattctcaactgaaggaaaacaaagagaattcattacagctgaactgctctaagagaattcctaaaggaagatctccagacagagaggaaaggatagaaggaatcttggaacatcggaaaggaatgaaatgacaggagtgataaatatgtgagtaaatgtaacaaattattattctctgctttgaattctttaaaatatgtatgaagattgagagcaaaaaattgtaccattgtctgatgatgttttcagtgtatgaacacaatgtatgtaatgcataaggcaatgatcacatagagagagagagggtctgcaggtccccatggaggaaagttttctgttttgttgttgtttatttattttattttatttatttatttattttgagagggagtctcactctgtcacccaggctggagtgcagtggcgcagtctcggctcactgcaagctccgcctcctgggctcatgccattctcctgcctcagcctcccaagtagcggggactacagacgcccgccaccacacctggctaattttttgtttatttagtagagacggggtttcaccacgttagccaggatggtctcgatctactgatctcgtgatctgcctgcctcagcctcccaaagtgctgggattacaggcgtgagccaccacgcccagcctattttatttttatttttaatttttagggtacatagtaggtgtatgtatttatggggcacacgagatattttggtacaggcatgcgatgtgtaataattacatcatggaaaattgggtatcaattccctaagcatttatcctttgtgttacaaacaatccaattatattcttttagttattttaaaatgtacagtgaaattattattgatgatagtccccctatttgttgtcatataacatggaatttagaagtaagcaatccggccctaggatgagggccctgtggtggtgtcaggatccggtctccttcccacttcctgccatgccctcctttaccagtggttttcaggttatggttccacggtggctgcccacctctgctcactgcatctgcatcccaggcaagacaacaggagcactcaacacaaatgtgcacggccatgggaacaggccagccacatattcctcttcaaaaggccctcccagaactactaggcagcattttctccttcctatattgaccggactttgtgatacaagagagaaaagaatttagcgaagtatatttacacactgaacaaaatcagggtcatattagcaaggaagaaaagaaaaatagacataaggtaggcaagccatagtatctttgacaacagttattaaatattgtatgcaaattttatatattatataatacacatatatgtatttatgtatgtgtatgtagatagcatggccattctatgtgaagtgacattttctaagtagactgcaaagagttaagtatgatcattgcaaaccttagaacaatcagtgtttaaaaaattaatctctataaagagatgtagtaagaaacacaatagatgatgctacatatgttcaaataacccaaaaagatggcagggaaggggaaacagaagaatgtcaaatggatggaacaaacagaaaacaaatagcaaaatagtagaactgaacccaaatatatcaatcattatagtaaatgacaatggtctacacacactcttaaaagacagaagttgtcagaatgcataaaacaacaagcattattcatatgctgctcataagaaactcactgcaaatataatggtgcaggtatattaaaaggaaaaagatttaaaaagattatctatatgaacactaatcaaaaaagccaggttggtgatattgatatcagacaaaatggacttgaaagcaaatatatttaccagggataaagtaaaacattacataatgatagaagagtcaattcatcaagaagacataacaataccaaatgtgtatgcatctaacaaaagagcttcaaaatatatgaagcaaaaactgaagaaactgaaaggagaaatagataaatctcccatgacagttgggaacttcagcactcctttattagtaagatatagaactggcaaagagaatctgcaaagatagggaagggaacaacaccatcaaccctctgcatctaattgacgtttacagaacactctacttaataaaaacagagctcacatactttcaagtctgcatggggcattcaccaagaaagatcatggaaatcataccaagtatgttttctgatcataatggaattaaaacagaaatcaactacataaagataacagaaaaatctccaaatacttggaaattaaacgacaccttttagatgatcattgggtcaaagagaaagtcttaagggaaattagaaaatactttgaacaataaaaatacagcatgccaaaatttgtgggacgtaaataaatcagcgctttaaaaaattaaggcactaaactcttctatgacaaaagaaagattgcaagtgaataatcgtcttcaccttaagaaactacaaaaaataaagagcagaatatgcacaaagcaagcagaagaaagacgagctgaaatcagtcaaattgaaaatagtaaaacaatacaaaatattaagaaataaaagctgactccttgttaagatcaataaaattagcaaacctctagcgtggctgacaaggaaatatagaatagaagctagaactaccaatatcagaaataaaagagactttttttagtgcatcttgcaaacatcaaatggataaggaaggtatacttcaaacaactctccacatacaaattcaacaacttacatgaaatggactaaggccttgaaaaccacaaactgccaaaactcccccaagatgaactagatagcctgcatagccctattagtaaaattggatctgtagttaatctttgagaaagaaatctccagccaggagcggtggctcatgcctgtaatcccagcactttgggaggctgaggcgggcggatcatgaggtcaggagatcaagaccatcctggctaacatggtgaaaccctgtctctactaaaaatacaaaaaattagccgggcatggtggtgggtgcctgtggtcccagctactagggaggctgaggcaggagaatggcgtgaacccgggaggcggagcttgccgtgagccgagattgtgccactgcactccagcctgggtgacagagtgagactccgtctcaaaaaaaaaaaaaaaaaaagaaatctccaagccaaggtggtttactgtcaaactctaccaaatatttagaaagaaatagcaccagttatatacaatttcttgaaaaaaaggaaatgttttctaccttatttgatgagataagcattaccctgttgtctaagccaaataaagataatacacaaaaagaaaactacagactaatattgttcatgaacacatataaaaatatccttacaaaactattagtaaatttaatctggtgatgtatagtaagatgaatacaagaccatcaacttgggcttcttctaggcattccaaaccaggtcaacattcaaaaatcaatcaatataatcaactgtattaactgtctcagaagtaatatcacatgatcatatctattggtacagaaaaggcatttgataaaacttagaatccactcacaataaaaactcaaagcaacctaggaataaaagaaaaattactcatcttgctaaagggcatttacaaaaacttatagctaacattttacttaatagtgaaagatgtaatttcccccgaaaatcataaaaaaaggctagagaatccccttttacccattctattcagcattataatgaaagtcctagcctgtataatagggcaggaaaaaaataaaagcatgcagtttaagaggaaaagataaaactgttctattcatagacaacatgactgtatacagaatcccaagagtagccaaaaaatcttctagaactaaaaggcaagtttagcaaggttaaacaaggtcaacacacacacacacacagacatttccatgcattagcgattgataaactgaaaaccaaaatttttaaaaatgccattttaaataggtcgaaaagtgaaatatataagcataaatatagcaaaacatgtacagaatttgaatgctgaaatagaaacaacactgatgagagctttcaaagaagacataaatcagtgaagagcctactgtactcaagattccaacactgtgaaaatgctgactattcctaaattgatgtacagattcaaaataattccaatcaaaatcccagcatgatttttttagacaaagacaaggtgattccaaaatttatatgaaatgtcaaatgaatttgaatagataaactattttttgaaaaataaaacggggaattaaattccttgatttaagacttactcttgagctgctgtaatcaagccagtgtggtgttggcaaagggttagatccacagatacgtggaaggccatatagagtccaaaaatggacctacacaaatacagacatttgcctttgttataatggtgcaaaaacaagtcaatggaaaaagcacagattttcaacaaatggtgttggggcaattggtcccttatatgccaaaaataagaacctcagcctaagactcgtaccatattcaaaaattaactcaggatgtattatggatctacatataacatgcaaacactggaaaacctttaaaagaaatcacaggaggaaatatttgggatcagggagttgaggaaagcattattagatgtgacttaacatcaaaagcataattcatacaagaaagcaataatgtattggactttatcaaaattagagcttttgctgcaaaagacattgttaagagaatgcaaaggtgactgttatgggttgaattgtatcctcccaaaattcccatgttgaagtcctaaccccagtacctcagaatgtgaccttatttggagatagagtctttgcagaggtgatcaagttaaagtgaggtcattagggtgagtcctactctaatctgactcgtgtccttataaagaaaggaaactataacaaagacacacacagatagaagaccacaggaggacacaggaggaagacagcatctcatctacatgtgaagaagcaaggcctccggagaaaccaatcctgcagagtcaccttgatctcagacttctggtttccaaaaaaagtatgagtgtattagtccattctcacactgctgtaaagaactacctgagaccaggtaatttataaagaatagagatttaattggatcacgattccacaggctgtacagaaagcatggctggggaggtctcaggaaacttacaatcatggcagaagatgaaggggaagtaggcatgtcttcatgtggccacagaaagaggaggatggtgaagggggaggtgctacacattttttttaaaaactggaccttgtcagaactcacatcacgagaacagcaagggggaaatccacccccatgatccaatcacctcctaccagacccctcctccaacattggggatcacaattcaacatgagatttggatggaaacacagagccaaaccgtatcagtgagatagtaaattccctttgtttaagctccccagcgtgtgggacttttttagggcagccacagcaaaccaatacagcaacttgcagactgggctaaaacatttgcaaaccacatatccaacaaaatacttggatacagaatatgtttttaaaagtcttaaaacttagcagtaagaaaataaatgcaccaattaagaaataaacaaaagacttaattacacgaaaaagcttttgcacagcaaaagaaacaatcaacagagtgaacaaacaactagcagagtggaagaagatatttgcaaactatccatccaacagggactaatatccggaatttacaaacaactcagacaactcaacaacaacaacaacaaaaccccaaacaatctcattgaaaagtgggcaaaggatgtgaatagatatttttcaaagaagatatgaagacatacaaatggccaagaagcatgcggaacaatgctcaacatcactaatcatcaaagaagtgcaaatttaaaccataatgaggttccatcttaaaccagccagaatggctattattaaaaagacaaaaagatcacagatgttgatacagagaaaagggaacacttatacactggtgatgggactgtaagttagtgcaacctttatagaaagcagtatggaaatttctcaacaaaaactaccatttgatcctgcagttccactactgggtgtacacccaaagttaaagaaattgtgataccagaaagatacctgcattcatgttgaccgcagcagtattcacaatagcaaagacaaggaaccaacctaagtatccacgaagggatgtttgagtagggaaaatgtgatctctatatacaatggaatactattcggccatgaaaagaatgaaatcatatcttttagcaacagggatggaactggaggccattattttgagtgaaacagctcagaaaacagaaagacaaataccacacgttctcactgataagtgggagttaaatcatatgtacacagggacgtgaagagtggaatgaaagataacagagacccagggtggggagtgggatggagacaggacaagaaattacttagtgggtacaatgtacattattcagctgatggatatgttaaagccctcacttcaccacaatgcaatatatccatgtaacaaaattacacttgtatcccataaatttacacaaaacagaaataggcaaaagatggaaaaagacattttaccaaacgatcacaaggaagggaaatcatcacataaaaatattttccctcatttgccgttgatgaagtgcaaaataaaaccataatgagatgccgttgcacatcaattacaatggccaaaatgaaattactgagaatgccaagtgctagcaagactagaaagactggatctctcatttcctgctggtgggaatgcaacaggatgcagccactctgagacatagtttggcagcttcttcatgattaagcagacaccgtatggctgagatcctgctcccggggaaagtaaacttgtgtgcacacatgtaagaaaatttcatagcaattttattaatgatcaccccaaattggagctaatccaaatgcccttcagcaggtgaatggataaacaaactgtgatccatccatacaaaagaatgttactcagcaacaaaaggaaatgaactattgataatatgcaacaatttggatgaatttcaaaggcattatgtggaaagaaggaagtcaatctccaaactttatactctgattctgtatgaaattcaaaaagctttctgagcttgacctccttccttctgcataatgtctttgaaattcatccaaattgttcttctatcaataggagggcgtgttttagagtgatggagctgttctgaatcttaatggttacagtgttaaaattcatagaactgcacatcaaaaaagttatttgtacggtgggacgatttttaaaaaataatataaagaaccatcagactcttccagtcttgctgaggactggtggggttgtgatattgaagctgtgtgcatcagagccctacggaaggccagagaaagagtggcgtcaccgtgtggccgtgcctgaattgcccagtggtgcagagcatgaggccacagatcaggccaagccgtcctcccagagactcacttctcagcaggtgagcatcaggctgttgttgaccggctgagccaggccctcctcgcctgtcacctgaactgttcatcctgttatggcccctctgcctgactgccttcattctctctccctccaacccgtctttttccctgcagccaatgtggtttttcttaactgtgcatccagcccaccacacctcaactttaaatactccaggagcttcttttctaaagaatggttcaaactccatttgcttactgtgcaaaacacttagagcccaggctgcattcccgcagctgcctacaaacctcatcccttcacggatctgctgtgtgactctgggcaagccaccaagccatgcccactctgctggtacttgtcgccctggtatggaaaatggggtgactataacagccatatcccagagttagcatagggaggaagtcacagtgacatcgaaagggctcaccaaaggctccttgctactgtttttattcggggctaatcccataactgttgttattacaaacagatacagacatccagtgcccactccgccacggtcaccacgaacgtggaatccgggttttattctgactctaccatactattacttagaaccctttctttacaaaaaggaaattgcgtttaaattgcttaaacaacaataacaatgaaacatattggctcatgtaactgaagagtccaaagaatgatttggcttcaggcatggtttgatccagaatctctaaagacatgaccaggactcttgttttttctctccctccattggtccagcttttctttggctgccttttcaaaacatctctctctgcattggagccagatggtcaccagcagctcccaagtccactggaccagctgtggacagggacaccctctcccagtagtctgtctggacagttgcaggaaacgccctgctcaggtcacaggcccatccctgaccccagatactttctcaagaatgtggagttcttgtccacaagctgattgtccaggctgaggtcatgtggctgcctctgtggcctgatgtctgaatgggggtgaggagaggggttgggtcagcatcatctagatggcatggaacaggcaggactgggggtcttcatcatgggcccccacactgtgggctctaggggtttcattgttgagagggaagtatggaccactggacagaccagtgaccacagtgtctgtggctgtgtgtcctgggacagtttgtaaactttggtggcctcatttgtgacacgggatgacagcagtccccgcccaggtctgctggagctctgagaggataagggtacccacagcactttgcaagtgcctgtcattagtgagaactctgaaactgtgccttccacagctacattgtgttattgttttgtgtggttgctttcgtattgcctagcaaatgacctagtcatgctaagaactaaattgatattagttcccttcactttgcagtcccacggacatttcaatcaccttataactcagcgtgtttgcaaattctatcccttctgcttgggaagctcctgttccaaccacaaataacaccccatcgtttagtagtaacagcattttaaacagcatttgtgtggctcttgcagctttttatgctctcttcatgccccctcatggaagcttcgcacacactcttggttctgtcgcatggttcccttttgacatcggtggcatcagaggtccacggaggagccacaggactgcctgtcggtctagcattaccttgtgcggcttaccttgtctgttttggctcccaaggctccagagggcagggcccagggctcaaccctcacatgtctcaagagctcagtacacggcggagattcccgggaaatgctgcagtgaactggattgtgaggcaatgcacagaacacagcactgcgtggcacctagcagttatgacgtttatcatcccgggtttctaccagtgccaggagagtcctgggaaatgagagtccactgagaggtcatgggatggaaggaactcacagacttggggcacagatggcttctctgtgcctgtgtcacccccgcctgcagatcccatgtccatcctggtgcccgagagtccccatcctgcatgcatggctttgaacctgctctgggctaggaatgtcaggcagtgcgtctgagcttcagcctctccatccataaaacaggaataacattactgcctatcaggatttcatgaggattaaataaggctgaatgagaaagaggcatataaacttgatttttacatgccttggaatataaatgcttcttaaaaatttcagtgatgccttttacaattctgaaaagttagtataaaaagtttgcctgccctgcctttctcctgagactgcatgtgaaaatcaaatacaacaacgaaagaaaaaaatgaagtgaatgtatcataccagctcagccagcgtgttttgatggcttgaactgaagacataccgagatgtcacaactgatgctgagctgtgtcccccaagccaagccattctctaccttgcaaccagaaactcacaaacacaagtctgaccatctcccctctttgcttgaactcttgggtggtcccgcttggccatggtgctcaatgccatcctggcttcaggatgatgcatgccacattttctgagatctggtcccagatactgcttctaccttggaatgtttttcttctcagaagaaacaaggatactaaaagaagcaagtaaaagcattgccctatgacggctgacaagaatagacagaaggacagaaggtgcatttcattcaatcacccagagaaaactgtgctcctggagacagaggtaacacccccagcttagcacaagacacagggcagtcagtggcgaatcctgccctggtaaggtctccaggcacccgaggcctggaggtttgtaacaagaaaaggagccaagttccctgtccccaggaaggagctggactcagatgaatagtgtgagggggataaagaaaaagtgtgctctcctcccgccgagaggcttcaagagcccctgcagattcggagtgataaggagcttagaccagcaactgctgtttgatgaagttgccatctgtgggatttgctgactttgagcaggactcagggatatctctgtgttacagcctggtcaggactgtgcagacgcgctttatctgatcctcggggaaatcattttctgagtaagctaagctatgatggcttctagagactctgccagctcccccagtggaaaggtcaatgaatcttccaccaagaaaaaataatcgtgggagggactctgcacattaaacaccacttctgagttccaaagaatgttcacaaaatagcatggcaaaaatggaaagaggtgaagcaggtgaagtttggggttcctctggggagacatttctggaccgtgcaagcttttgagggttgagattgggccttctcatggcttcatcctgtgacagtgtccagcacctggtgatgatggtttcgtggtggtggtaggcactcaagctgtgtcaccaggcaccattgtttggcgaatttgccatcatccaaggtatggccatagccacctgggcccagatgctgtcttttgtctggggctcagacttgatcagacacaggtgggaagctcatgagagacaagcacataatgaaaatgtcagtgtgctggttttcaacatcacagggtggaaggaggagcctcctggccattccctactgagatgggtgttgtttagaaactgacatttgattccctgctaccatcacaccattgttgagagcactcactctttctaaagccttggtgagagcctcctcgttcccagacctgcctcaccttgctcaccctcacaccatcctccatcctctgtcgggccagcgagcctgttccgtgtgggacgcaaccccctgacgatggcggtgtcttacctcctcaccatctgcacgctcttctagctctgcactgcacctggagcgatggggccgaacatgacctattagcaagactcccccttgccccatagaaagatgagatcagcctccttgtcatgaggttagggccaggacaccacacacgtgggttgggttccacaacatggagtccaaaatgatagaaatttcacgacattgcaaactccttagtattctggctatgcagtgatgggggcagctggaattctgaccccaggcaccagcccctcagtggctctgcccaatgctggccggcctcagtttgccacaggagcccgaggcctctctgtggcaccaagaacagctgggtcactgtgcatgtggtcagaatgccacgtggtttatggcctcaatttaaatgattacaagtattaattaatggatggttggaggatggaggatggacaggactacccaatatttactgagcacctgctttgtgccaggcaccctgaagccctgatgggcactgcacttgctcctccaagcacctctctttccatctcctaagtggccgagcagccacagccattattgccccgtgccagattcagtatgcggaggatcaatgcggcagcagagcgtccatgctctgagtggcgcgggctttgggtgatggcatttccccagctgtgttccctggcagagactgtggtgatatttctggctttgttgctatgtcaacccccgatcttgttcttgcctcctgtcttgcgtcaggctggaggcagcctctcccgagctctccctgtccctggtgtgcacgggaggctgcaggctgtgagcagccatgccgatgagcctcacatcacacagtgaacttccccttgcttggatgtctgaccaccaccatgaggggcctactcttaggctccaggggcaggctgggcacccccactgagttctcacctgaggggagagacctggacattagtggggtgaagaacgcgatgagggtcctgagacagaggcctgcttgaagagtaggatagtgtctcccgcgtcacaggtgacagcaactcattgttgaatgagcagtagctgagcgagtggacagatgcatgatgacatgtaacgatctggacttgttcaacgtaggaatggggccaggaaccataacaccacggcagcacaattgcatagtacagcaatagcatctaacatgaattgggtacttactgtgtaccaggcaccattcctagcatgacgtgcaggaaggtgtccagtcctacagcagatgtaatgcaggtgtatcactgccgtggtgccgtgcaccggggacagcacacagggaagctggggtcacggagactacattgagatttacccacctcaccgtgtccaaagagggtggggaccactttctatgcggaagaactatcagcttcataaatggttccctgtcactggagcaattgggagctggtccgtggtatgggcaggaaaccatggatgtgcgcggtcaatggctacagggacggagggcaagggtgggcaggctgagtcatcaggaggtgaagtggcagcgcatgaggactgtgtggacaacagggtggaggtggaggagacccccatgcctgggggagaaggatcgtgtggggagctgctgtaacatgctcagggagcacagagggtatgcactcctgagccacgaggaaggtggttccaattctcacaaaacctccagagcaggagaggagaagcttgccaggggcagtgtggagtggggaatggggagtgccttggaagaagcctgaagaacatccctgctcaggagggagaaccacggggagtggagatgacagaggacgagaggccatggctgcagagggtcttcctcgggctgactcaggtgcatgctgggaattgcatcagggaggtctctgtgggcttcggtgacagctgtgcacgacgatgggggaacttggtggtgaacgcaggtaattacgtctggaagtttagtgtgaagacaaggaaggaaacttgattgatgcaggaaggggtcatggtttgcaaggtgctctcttgcctgcggtgccccatggttgagtggagcaccttctgtgcagggtgacagggctgggaggggacaggggaagagtgtgtggggtgaggcggcttctgggctcctgatcagtctctggggtggctgtcttcgtggatttcctttgaggtgtggggcccaagctgatcctggcctcactattggaatgagggtctcagggtgggtgtggtaccatgtaaaggtgccagcaagtcctcacaggtagggatggcctggctcctgacaggtagacccctgaggtgcaggaagcctcttctttgagaccagcaggctggtctccccaaggaggtctgaggagcagccatgtcagacccggctctgttccgagcctgcagccagagggcaggtcccacgttccaggccttcttccctcctggcccctgtcctcagtgttgctcgagccctgagtgtgccaggtgctcactcaggggggccttggagcaccggggggccatcccctccacagggaggagggagatgggcttttctcccaggaaacgtttttttttttgagatggagttttgctcttactgcctaggctggagtgcaatggtgcgatctcggctcaccgcaacctccacatcccaggttcaaatgattctcctgcctcagcctcccaagtagctggcattacaggcatgcgccatcatgcccggctaattttgtattttttttagtagagacggggtttcaccatgttggtcaggctggtcttgagttcctgacctcaggtgatccgcccgcctcggcctcccaaagtgctaggattacaggcatcagccaccacgcccggcctctcccaggaaacattttaaaatgtactttactgataccgctaatgtctgttttattttaaaatagagaaaaaaaggaagaaaccaccccctgccttgaatagttacacctgcacttgccgtccactgtgactctctgtgaggtttatttttgtgacattttcctatgaagtaagtggagaagatggcacttcctgggtaggcaggcacctggcaggacagcagggggtgcccaggtgcacagaggctgcccagggaacgcggtttcccccacaaccagctccgccttcccacagccacccctggctggagtacaagttactggggctcagttcttaggattcctacaaagcccaatttgggtcacctgacttgttaagtcaggtgaaggtgacttacctgaggggcctgcaggatgtggggtcaggctctggcactgggtgctctctgtcctcctcaaacgctctctatgctcactggccttcagggttcttgggggctcctgtttgctcttcgggcgttggcatcctccagtggactccagggaagttaaataaatgccaagaggattcacgtggcagggccctggaggtggagaggaaggagcacaggagacaccaggtgctcactgtccagcggggatgcaggcatgaacatggcagaggcaggcagcacccctcagagcgctgagctgtcgggaagcccccggccctggtcactccccacgcctgcccagagaggccgcgccagatccattaaaagtgtttcagcagcttcagaggcccccatttgtactgcccattctggagacaacagcgccctctgcagtgccctccttcagccttggggcatgtgaaggagcattggggctggcagacagcctccgtgggctgggagagaggtggacccccgggtgagaggatgcaggggattgttgtgctctgcagttttggggcaggtgtagcctgacctcaggctcttagagggaggagtccagggccaataacctgaccctgtgaagtgggggctatgtgaccctcacagagcctctgccctgtgggctccaaactgaaagctttctaggctgagtccagaagatattctctgtggtccccatgtggagctgggggctcgttgctcaccaggagagggacgctgggtgctggggctggggggccctcctgggatagcagcaggttcatatcttgctctggacaccagatactcacctgctcatcctctacaatgcacctctgcatgccaggaagcccacagcgtgcagatgagaagaccagggctgaggttggctctgtttcccaagcagatggtggaaggcagatctgaacccaagttctgtgtgattcccaaagcagaaggacagacagctgcccccctgaatggcactgatgctgccaggggacaggagcgactcctgcagccacctttcctgagcactgaggctgaatgtgggaagcaggggagggtgccaggccccaggagaccctgaaagctggcaggaaaagcaaagcagcagtgcagggaaagcctcttgggggcactgtcctggggggaaggagagcacagaaggtgggtcctgagcttctaccattccagggcttcctgaggaggccctgcttctccttaatgaatgaacatagctgctattccaatcttctggcattcctcaccatatcagttccccctctggttgctgccttcatagcctgaggagcccctcttgctaagggtaaacccaccaggaggtaacgggaagaatgggaggacttccaccaaggtcagcttgccaagtgatgctgctctagccacagggccccttggctctgacacaggacagcatgaccattgtgcagcaaggtgacactggtgagtcctgcaccagggagagcctgtcactggcagtgccagaggcttaggatctaacagttccagtgtaactgagaggtcctagagtgcgaatgagggaggttcccacactgcgcaggttggagagatgctgcgttaccgacgctgaagtggttgatgccaggggcagggccattgctattctaggatggttcaatccccaaacctcatcctaccacatctcctcctgaatggcttcttgatgtcccttgaatgtcactttgctgtggcttgtgctccatggagaagcagccagtcattgatctgttggacgtctgtgactcttcctaattgagtgtcctcgcccgagttcttaccctgccctgtagagccacagagcagtttgtttctgaggacagcgcttcccatgtgggaagagagtggattggtgcatccaggcttgttctccaggggtgtcctgtgacatgtgtctgggttattgcttgtattagtcagcttgggaggctgtaacaaagcaccacagaccgcgcagcttaaacaacagacatgcattttttcactgttttggaggctggaagtccaagatcaaggcattggcagggctggtttctcctgggacctctctctctttggcttgtagatgcaatcttttccctgtgttctcacacagtcatcattctgtatatgtctgtgtcctaatttcatcttatgggacaccagccatgttggattagggtctatccatatgattttatttaatgcactcacctctttaaagacaccctttctaaatgcagccacactaggagttagagcttccacatatggatttttcagaaggctcgatttagtccctaacacccctgccttggcatcctgtggtcattcacctcccaaacttttgcctctcctccctcctgacttccctatagccattgggatccatcctaggatggggtttgaaggcaaacatatagccctggcacagaccaatggggcgagagtcatatctcctttcttttcctgtcttttcaccatagaaaacctacctaaacttaagtatttgtttcaagatcaagatctcctgttgggatgcctgtgggaagcattgctcagaggctgttctccaaccttgtaccctaaatccctcaatagggtacaagaagcaggaagtggaggcctgggagccaggcagaagctgggaggatgcagacacatctctgaaagagggggcctgctgggttttaatctttaatttgctttattggtgggcttcaggcatctaatgagatacatgagctttctcacacaagaggataattttagttttgaccacaggagagaaaaacacatccctgggcttgagacagacagtatttttatggtattttttaatgcttttgagtattaaacttttatgggtgtttttaaaaattcaggaaggaacttccaaactctcatgcatcccgtggcctttgattgtcagaggtgcagcacgacggcgtggtagagggggtgggtgtggacgttagcagcccggattcagatccagacagacccctggctgcgactccaattccacatcagtaaaatggggtaatggggtttgtggggctctctgaggactgtgtgtcacgcccattctggagacaacagcaccctctgcagagccctccttcagccttggggcaggtgaaggagcatcagggccagcagacagcctccctggaccgggagagaggtgcacccccgggcgagaggatgcaagggactgttgtgctctgcagtttgggggcaggtgtagcctgacctcaggctcttaaagggaggagtccggggccagtgacctgaccctgtgaggtgggggctcacactgcaaaagtggcctggcttagcactgcactgaaagggctcagcagatgtccccatggattgatcattaggtcaatggatgtaaaacatttctgctcaaatcaaaccactaaaacggcttgattttttttcactcaacaacagctgtttcagctccagctgtggctgaaaggggccaaggtacatctcaggccattgcttcagagggtgcaagccccaagccttggcagcttagacatggtattcagcctgcaggtacacagaagtcaagaattgaggttggagaacctccacctagatttctgaggatgtacagaaatgcctggatgtccaggcagaaaattgctgcaggaacagtgccctcatggagaaccgctgctagggtggtacataagggaaatgtggagttggagcccccacatagagtccccactgtggcattgcctagtggagctgtgagaagagggccaccgtactccagaccaaagaacggtagatccactgacagcttgcaccacgcacctggaaaagccacagacactcaatgccagccatgaaagcaatgatggtgatgaaatgagagagctgctctcacagaagcaggaaaaccatggcagagcgaagggactgggaacacagatgccaggagacagggacaagtctttccagacaaggggcacctgcatttcactctcacactcctttaatgaacaaagcgaattcctcccataagggaagcatgcgctgacccctgccctttgagaggcggggaggctgggaaaggcaacaagacaccagagagcaaaagcagtgcagcacgggggtgcacagccagccaggcactggagctgggcagggccgggtggagaagacctgcagttggttgagaaatcaggagtgtctcagtggagtgactagtgtgtggagcctacctggcatatttaggagctgaacttcaccactggggcagggactggctgggtgaataaaggccaggggagaccccagggtaagatggggaggctggtacaaccctaaagggtcccctgggctgagttaggtggtccagaccaggtacttgagtcaccaggagctgcagagctctctaaagaggtcatggtacctttgggaagatgacttcaggaccaaagcagtccaccaaacagagcagtcatgtcctctgcccctaaaaatgccataaaaatgacagaaaaaggtagaataagtgtataaccagcaagagataccatgaaagagacaaagaggctgcaggatttctcaggaggaggggtaggatcagacgggtggagaaaccaaagcgaaccacacacaaaaaacagcaggaaaagctactgcaaagatgaggccaaaccctgtgcccaacaggcaggcagagacggggcatgggcgcagtcctcagggcaactgaacaagtgggcacaggaagaactggcttctgaacaaaaggaagggccggaggctgcacggcgctgcagcagagtctgtgtattctggagtctgcctccatgggcctgaatttgttctataaaacggagatcgtgaggatgtcacttttcagcttcagccagtgcagtttttatcatgatgtcgtgatgcacactgcgtgggggaggggcagggggctactggtaacccaagagtgaagctgaacaggaaggcggagcagaaccagctgcagtgttctagtgttcaagagaacagtagggaaattatagttgacgataatttattgtctatttcaaaatagccagaagaaaagaattgtgctgctcccaacacaaagaaaagatgaatgtttgaggaggtggatatcccagttaccatgactggatcgttacacactgtatatgtgtatcaaaatatcatatggcctcagaatatgtacagctatgatatatcaattagaaatacaaaacaagagaatggaatggaaggagacatggaagggaggggccctctgctgtcttcaagaaagctgccaacctgggggtattcaggataaattcacaggttacaacctgagaagtaaaaagaaaaagaaaaaaaacataaggaataaaaattatcagagttcttggaaatttttaaaatacctgagatatgtctgagtagcagaatggccaaacactgaatcattcgtctagatgcctgggttgtggagttttaccagaagagagtgagacagaggaggaaagagattagaagaaaggaaatgctcacagatggaaagaagaatgtttccccgaattgaggaaagtcgtgcatttttagattaaaaagagtctattttgggacaaaagagattaagaaaaaaatgcaagcacttagatacattctaaataaagaacttcaaaagttaagaaactatccccaaatcttttatagcgtgacaccaccaaaaagagattcctagtatggaacaagcttcttactggtgacaaatttctaatagccacatcacaccttcagagaaaatgacttccaagatctgaaaatattttgagtctgtaattctatgcccagacaaactattattcaaatcgaggagcaaaataaccaattttcatgcataaaaaacctcagaaaatcaatttacagtctatgggctcttttgaaaaataacttgaatatacatctaaacaaaacagtagtaaacaaacaaaaatcatgagcccaataagaataaggaccatgggatgaagaagaatgacaagaaaagaaacagcagaatgttgtagttaattgtaaattgatttctaggtaaaatatataaaactaggaacatatttttatactaaaaagtaggatcttaacatggcagtggtgagaattgggcaggaaaggagcgaggagaaagtgaaagtatgctaaatgtctaattttctccagtagaaggaaaactatttattatgacttttagaaaaatgttaggctgaatatatgtgctaaaaaaatacgatggtttctgaccagctattgatcaattggatgtctacatcaaaaaaaaaaaaaaaaaaaaaaaaaaaaaaaaaaaaaggattttaagaactactttgtaccatactcaaaaaacaatttgttagacttgggatctaaatttcaaagttaaaaatatatatcttttagaattagcatggtaaaatatcttcataaactttgagtagacagagttaagggtaatcattacgatcatatatagagaatttaaagaggcacatttaaaacaaaatgatataaacagaagatatttcaatggaaaaatatatccaggaaaatatatgcatatgttttaaaatataaagcaggtgtgttaatattaatgtcacacaaggaagacttcaaggcaaagatcataaaacaccagtttagcagtaatgttttatttctttcattaaaaatagaaagttgaaaagtatcataagcattcaactcagtcagttagcagaacaaacattagtctgaacacacacatacgcacacaccccaaaacaaacagaacaaaatttagaaaaatggaagttgtgaaattaaaagcagaaattaataaaatatgaaaaataacagagaaagcccagaaagctaaaagaagcttatttgaaataattgatgaaatagatatcactctgtggaaagccgtgaatccaaatggggagagataacaaatacaacctgtaagaatgaaccctctcataggtactgtggactttcaaaatagaagagaatactgccttagagtctattttgtgcctatggatttaatatctatgatgaaatggaaattttatagaaaactataaaataccaaaatttactagaggaaaaacaaaatttcaggatagacctgtaactattttataaattgtagcattactcaaaaatcttttaattccctttctccccagcaccaaacaccaacaaggcaccgcaaaggggattttgagggtaaatttctcaaaaccctaaagggacaaataattccttttcaacacagagggaaataatatcagaaagcttttcaggcctttctagaagatgatgtccttgacaccaaaactggacaaggataatacaaaaaataaaatgctacattgatttctgttgtgaaagttgatgcaaacatggtaaaaatataataaattgaattcaggactatgtaaaatttatatacatgtgtatgaatatatataattatatatatgaatatataattatatatattagtatttattccaagtttattttatgcaatgagtttataacattaggaaaaatccattaatataattgatcatattaagaaattaagaagaaaaaatacttatcatcacaattgacaaaagaagcatttaataaaagatgtaactccatagtatttaaagtgactaattcaaccaaccaatgcataatatcaatatcttaatattttagcagattgggaatatgacataaggaccctgaatacaaaaaagtgtttgtaaccacccagatatcatgtcaatggtgaaactccaggtcagttgttttcaaaggcagaggcaagataaaagattttctctcaacactctcttgaagaaagagggtagggtggatggtttatgaatcccagagaggaggaaaccaatttgctattatttgcagattatatgaatgtttatatagagtaggtttacatagaaaaggaaagttcactgagatttctaggtacaagatctagcaacatgcacaaaccaatattgtttatgtataacagcttcaaacaattagaaattgtagtaaccattatgaaagtgatgaaaattgtattgcttagtattctaccaaaattattaagtaattttttttttttttttgagacggagtcttgcactgtcgcccaggctggagtgcagtggcgccatctcagctcactgcaagctctacctcccgggttcacgccattctcctgcctcagcctccagagtagctgggactacaggtgcccaccaccacgcccggctaattttttgtatttttagtagagacagggtttcaccgtgttagccaggatggtcttgatctcctgatcttgtgatccgcccgcctcgacctcccaaagtgctgggattacaggcgtgagccaccgcgcccagccttaagtaatttttaaagaaaataatgaacttccattgagaaacttagaggagaacttaaagaaattacagacatacactctgttttcccaatgttttaacgatgagaattctccccaagtggaaatatcaactcaattatatgtggttgagagatatgctgtacatacaccgtaggattctatagtgtatatggaataggatgtgttctcatttatttttatggctgcgagtagtccatggcatagtataaatacgatggtgtatattctatatacatcatggaatactctgcagccataaaaaggaatgagatcatgtcctttgcagggatatggatggagctggaggccattatccttagcaaactaatgcaagaacagaaaaccaaatgccaaatgttttcacttataagtggtagctaaataatgagaatacatggacacaaacaggggaacaacagacactgggccctacttgtggatggagggtcgggggagggagaggagcacaaaaataactattgggtgctaggcttactacctggatgacgaaagaatctgtacaacaaaccccatgacaggagttcacccatataacaaacctgcacatgtacccctgaacctaaaatacaagttaaagaataaaaaccaaaaaaacaaaattgtaacagaatttttcacatcagaggacaagttgattctagtatctgaacagactaaatgactagaaaaagccaggtcaaaattaaaaaaataagcataaaaaggaaggagatttgtcctactaaaataaatatttccttacaagtttcaggaaataaacagcatggtatcattgctggtgtggacaacggatccactgatgccgtcatcaaagacgcatcaaacacgcaaagcaacaccacacaccagaggcctgctattagcaactggctttccctatagaacaaaaagaaattattctggcaggaaaagctgctctgaaatgccatgaagtgataaatagccgttatttatcctgcgtgttggggccactgatgtgttttgctgcaggtgcattagatgcggacggaggggagtttgcctgatgcagttgaggaccttgcggggcgattgcacctgtttccttttgcagaagactgactctgagatgcatctggtccaggtgttcaggtgggaggttgtggatggatgtgcacgagggccttaggtgccaggagaatgaatgctgatgcttgcagttgtgcatcttgagaaggggccgtggccagctcacttttcgtgtttctgttctgaaaaaccagccttgagaaaatactttgcctctatgacatcagaccactgccgcagagcttggggattcttgaagcagagatgcaaaatatgtttcaaaatatccagagagggacctgctggagtgccctgctgctctggatggtgtcctttccgcaggctgagatctgtggcctgaagcaccttgtcctgagagaggagtggctcctctggctcccccggttctgtggcttaagtctgcggggtcccaagcgggtgcccatctcggagaggtcggcattgcatctttgcagatggaaggaagccccctggagtggcaagtcgggccgagcatctgggtggatgctttctctagggctctgggattggaaatggacccgtccaatgtcggtgctgtgtccccttgcccatctccccatcagcacctgtgttgtgcctgcctggctcccacctcctgctcccagtccacacctttcccttcctccctcccttcacaccttggctgttcccaaggctttcccacttgctccttccttatggtgaaattcacagttgtcatccttgctcagagttcctcagagccactagcccaggtccagtcactggtttcagccacctttgcagaaatcaggagacatgtctcactaacaactccgagaaagtcgaactcgtctgggcgtggtggctcacgcctgtaatcccagcactttgggaggccaaggcaggcggatcacctgaggtcgggagttcaagaccagcctggtcaacatggagaaaccccgtctctactaaaaatacaaaattagctgggtgtggtggcgcatgcctgtaatctcagctactcaggaggctgaggcaggagaattgcttgaacccgggaggcggaggttgtggtgagccaagattgtgccattgtactccagcctgggccacaagagcaaaactctgtctcaaaaaaaaaaagaaaagaaagaaaaaaaattgaactctcaatccctagatgtaaaatcaacctcgtgttcttgatttcaccagtaattcataaccacaactgttgtgtcttgaacacttactatgcttggcatacttataatttttatttcactttatcctcaaatttaagatgaagtttctcctactgactccattaaatgcatgccaggatcaaggattctagagctgtagggacttgtccaagtcacacgttgtggacagcaaagccagtgtgtgagtcagagcctgagcctggaagccagaaactctaggctgaggagtctctctgtcacccgtgcctgcccaggtggcaggatcctgcttgtgacctctcaccctgagctgcagaccttctgtttcgtgatccgcgtgcctggactatcactgccggtcatcacggcaggtgttccatgctgcccatgcctggccggcctcagtccctgccggggaggtcactgagtgtccattgcatcctgggggtacatggactccctgccatggtctttctcgtctgcctgttcttgagtcttctgagcttgtaggtggggggcgtgtggagtagagctgcaacagcagcctttgtagaatgctcactgcacaccaggcatggttctgggaggcccatttccatccatttgatgagtttgtttctgcaatagtgccaagcacagtagaaggcaaatactcagtggctcatgaagacatctagaagtatttctgttgcttccaaacacaaagtatcctctgagctatgcacagtggtgggtggtgccattcacggaccctgtgttctctctgagcagagcttcctctgtggaggaggtgataatggggtcacataaattccttcacaggtgacaagagccagcaaggctctccatgtgaagcccgtgaggacacgggatccctgaggccaaggccaagtctgatgtccctgaggccgggccgatggtgggcatgtgtgctgaataaataaagagtgctgctaagtgctaagatgagggcatgagaagggcttccccttagctagagtctgagggccagtgaggactcacaggtgacccctcctggcgatcaggccttgtgtcccatgccgctctcttccatagggtgacagcttcaacagcgtctccattccccctgggcctgtctcctgtgagcctcctggctcacagctcctggttggctccctaccccctcccaggcagcacagtccagctgtggacagtccagtacagtccagcgtcaccacatggacactgagggtggtgtccctggacccaatgtctgggcagtgataggatgcagaccacaccaagagaagcccggggtcccaccagctgaggggtggttaatgggggtccactccacagctgcagcctggagacccccacttgccagcctggtgctgtcagcagttctgggacaggtccactgtggatagacagggaaggagagagggctcaggtgccctctgcagagcattcagggtaagcgaggtcttgagggactggccaactttggagatgggataacgagggatggacgcttctcccagcaggggagcatggccgccatggccccttctttgctggaagggcctgatttactttggatttcacccttctgtgcatccaggaagggccgcgcccagtcttgggaactgaggggtcagagcagttatgcccagtgttcatggggacacagggcatggtcccacgtgggcaactgcaggcagaggctgatggtgtaatggcgtgtgtgggaggatgcacctctctctgtgttggggctcacatgtttccttggactccagcactgctgaggccacccggggaccatccagaaagatgaatagacactctcaggcccttgatggctctgttgtgtggcccaggtaacccatcctccctctgggctttcctccagtttggctgaggtgggggtggggctggacagaggggagctgctgggacttggggccatcagtgccaggccaaggggagcagcctcatgaagaaagcaccagaaagcaggagttgggcacataggcagcgtgtcccacctgcaggagaggcctagagaggtggtcagagctgggggccagcttgccgcactgacccaaggctcagctatcaggaatcaggagggaagcagtcctttccactcactggccacactttctgtaattccagctgtgaatggttggggcctgggcttagtctaggccaccaggaagaatatgacgtggtacctgagggcctgcctgcaggatgccttttggttcacgagaaaaaatgatggggtctaagccaatgagagcatgtacctatgtgttgtgagttgatgttccagccacagagctaggaaggagttggattaagtccctggagcaggaatggcttcctagaggaggccagtatagcagtgggagaacccagtggtacattttctcattgttaagggtgaagggtacatcggaggagagacctctccataaaaatatccatgcagcaaaaagtggtccaaagcacctgctctctgtttaggcaagcatacctgaaagaggtggcacagtcctctcagggcagtggagggatgggggctcccccagcaagaggatctggcaagatacacagctctggtgacccatgggcagctgctagggagccttctctccaccctgaaaatagcttctggctgctgggtgaactatggagagaaagcgttttattatttttcctagccctgtaatgcattgcttcactgtcagcttagcagggagaggagagcagccaggatcacattgacctcagctcccaggatgcaggatactaaatcaatcaaactagattaaaagctttggacatatcttgaactcagggttgggaggcaaccctttcttcttattccagctgcttcccgggaggatgcccagcatgcggggatctgcaagggctcagtgctttgaattatttaaagatggagcagggctgggatatgggaaagtatcctgacttagagctgcagtgcgttctgccacagagagccatggggatgccctgctgatggtgaagacaaagtgcaggcggaagacaaagtccaggcagacttggttgtcaccatagtggatttcccagtttaagagactctattctgcagccaaggggctgctgccttttgtatccacccctcctccccaaaccaagaccaagaaatactccttctacctggtctttgaggcagccctgcccctttagaggagacggaagattggtcagaagctgtgggttcaaatcccagccccactcctgaagctgggcaacaccgggaagctgattgaactctctgggatctccctccactgtgaatgatgttcattcttaccagctttatgggtccaagtcattccaggcactatcctgggctttatcctcccacttgtgaataaagcacattcattgagcgcctgctatcttacaggtttacatcaggaaaacaaaacagatgacatccatgggctctcaaggaaattgcaatataatgacaaatttctctcaactgtttggcttctctggaggaaatacgcaggatatgcagtaagaagtgagatgggatcgtcaggtaaggctgcctggaggaggtggcatggaagccaaggctgtagagcaagttgactaggcattgcacagggggaactgcatccttggtagagggaaaggaatgtgtaagccttgaggtaggcaccagctctctggttagaggaagagacggtaggccctctccagggcagcttgagcttagggaaggaagataagtatcatgacaagaggacggatgggcctagatctcacaggatttgtgggtcaggcttggattggcttattctagggctaatgcaaagccagggctgaggtttccggtggtgatgacctgcactgtgatgggaccttttggctgcttctggtgcaggcaattgtcagccttcacctttgccccatcagctttgccagaagtttggccaacttccctgaaaggccttttctaaccatctcagttaaattgcagtctgcatttcataatcataaagaggtcaattatctaagaagacagagcaatacttaatgtgcatgcacctaacaacaaagcatcataacacgtgaggccaaaaacgatagacccgtgaagagatgcatccactactgtagtaggagacttaaaatccctcagtcagcacaggacagatgtagcaggcagaaaatcagtaaggatgtggttgaactcaatggtaccatcaatcaagtggatataatcaataccaatagatgacttcatttaacaataacagagtacatatccttctcaagatcacatggaacattcaccaaaatggatgaaagtctcggccataaaacacatttaacacatttaaaagaatagaaatcatacagtgtgtgcctttaggccacagtgcaattaaactggaaatcaataacagaaagctggaaaattccaaagtacttgcagattaaacaacacacttgtaaataacacatgggtcaaagaagaaatctcaagaggaattttaaacatatttggaactgaataaaaatgaaaagataacatcacaatttgtgagatgcagcaaaagaaatatttagaggaaaatttatagctttgaatgtatacattagaaaagatgaaaaatctaaaatcaatcaccttagatgtatatattagattggatgtaatttccaaagcataggaaaataaataaaaattggaacaaaaataaataaaattgaaaatcagaaatggacaaaaccaaaagctggcttttgaaaagatcaacaaaattgataagcctctagccaagctaactaaaaaaagagagaacacaaattactttaatgagaaatgaaagagggaacatcactaccgatcttatgaacattaacaggatagtaaaggaaactatgaacaactgtatgcctccaaatttaataacatagattaaatggaccaattccttaaaagacacaatctggcaaaattcacgcaagaagaaatagacaatctgaaagccatctatctatcaacaaaattgaatcaataattaataaccttcaaaaagagaaagcactaggcccagatgggtttattggtgaaatctaccaaatatttaaggaaaacattacaccaaatatctacaattccttacagagaatagaagcagagggaattcttcctctcattctattaggtcagtcttaccttaatacccaaaccagacaaagatattttttaaaaaaagacaacagaccaatatctctcatgagtatagattcaaaactcctcaatcaaatattagcaaattgagtcatgaatagaaaaatacataaaaataattatatattgtgaccaaataagacttatattaggtatgcaaggctggttgaacatttgaaaatcaattaatataatcaatcataatggtaggccaaagaaggaaaatcaagtgatcacatgaaaaattgcagaagtacttgatattgtaaaactcaacacccattcattataaaaactcctagcaaacttagggcagagagtaatttcctcaaatggataaagaacatctgcaacatacctacagctaatatgatatttcataggtgagaaactggaagattttctgctaagacaagaaacaaggaaaagatgttccctcaccactgctttcaacattataccagaatttctagctattgtgataagacaataaaataaaataaaacgtatatggattggaaaggaagaaataaaactgtctttattcacaattgacataaacatctatgtagaaatccaaaagaatgcactgaaatacaaaccctgaaattaataagcaattatagcaaggttgttggttatacagttaatataaaatgtttgcgacttttctatttatcagcaaagaacaaatggaatatgaaataaaaacaaaacaccatttacattagccttccccaaatgaattacttatacatacatcaaacgaaatatgtacaaaatgtacatgagaaaaattataaaactgtgataaaataaagaaataactacatggggaactattcaatgtttattattaggaagacttgatattatcaagacatcagttcttctcaactcgatcttctcaatgcaatctcaatcaaaataccagcagcttattttgtaggtatcagcaaagtgattctcaggtttatttggagaggcaaaatacccagaggagccagctcaatattgaaaaagaacagagttggaggattgactctacccgacttcaagacttactattaagcatagtaatcaagacagtatggtactggtgaaagaacaggcaaataaaccaacagaacagggtagaaagcccagaaaaagacccaaataaatatagtcaactgatctttaagaaaggattaagggcaatacagtggacccaaaatagccttttcaacaaatggctctacaacacttggacatccacatgtaacaaaatgaatttagacacagactttacacccagcctaaaaattaactcaacatgtattatacatttacatttaggctaatatgatactaaatgttgagaaactataagtgtaaatataaaatgtaaaatgaaaatctagaaaaatcccagaagataagagaaaatccagatgaccttgggtgtggtgatgactttttagacacaacagaaaaaacatgatccatgaaaaaagtaattgatacgttggacttcattaaaattaaaaactctctctatgccctcttccttggtggactcaccctgagcttctgtcttagtccctggctcctggttgggccccatggccctgcctgagtccttgtgctgtgggaggctgcactctgccagggtgggggccgcacacccctctggctggcccctgcttctcatcctccccatccctggccaactgtagcttctggagacagcatggctgcctgcgcagtcatcagctacacagatcctcagctgaacactaggacttcacgcggcagtccagcttttccctactgctggctctctcctgattggcaatgcccgactgctggaccggaggtgctgggtcccaggcatgagttaaaccatgtgccctttgggttcctcagactgttccaggcaggggcatgggccttaccctcctccctgtctcccaagtctcctgcccccttgcctggcacacacaatgccaccctttcctgcccctgccctgccttgtctgcaccttctctgggttgcagcagcagagagacctgtgcacctgcccctccaggtatggggcctcccagctcaacatgtagccctttccttggaaacccaactaactggtgagtgcacgtcctcaactccccaggcaccctccctctggcctgcagacacaattgttcttgccacatcagatcccagcgggctccttggtgctcagtgctgcggctgccacggggctgtgcatgccctgcctggccctcctcttaggaagacaaagagaactgcaggcttgggagagccttttacatgactcggtgggttcttcctgtttcccttcacaactaaagccataggattgaatgtttctcaagaaaagagcgtaaatcagggtgtacaattgctgaattgcctgtttccaagtggaagggatagagccgtgggtgctaagagacgagaactttatcctagtcttacctccctggagtgacctcggcaagggaattagctcctaactgtggtttcctgagggtggaagcacagcgtggctcgttgttgctaagtgcttttcctgtggtaacgagtgtggtcattgtgatttattggcgtggctgagtgttggctctgactttgtcttccctgtgctagtcatctggggacagaggcccgtttggccactggggggtctttgtggagacggcccaccagcatcccgggacagaggctgctctggcccccctgaacgcgtgtttcccacgctgtcctgcaggtgggtaggtctgcggcttccacgcgctcccaagctccagcatggtctctggcacagagcagggccctgaagctttgggatcgttcagctattccatcctaatcctagaggcagcatgtcctggaggaaataaatcaggctcaggacaagagcctctgagctcaaagtcctgccctaccatttccaagcctctaccttgatcctgtttaatttaatttaatttaattaattaacttatttatttatttatttattttgtgacagagtctgactctgttgcccaggctggagtgcagtggtgtgatcttggctcactgcagcctctgcctcctgggctcaagcgatcctcccacctcagcctcgtgagtagctggcagtacgggtgcacaccaccacgcctggctttttgtatttttagtagagacagggtttcgccatgttggccaggctggtcttgaattcctgtcctcaagtgatccacccgcctcggcctcccaaagtgatgagatcacaggcatgagccactgtgcctgaccctcctttagttatgttttttaatgtataaaatcaggatgatcataattctgggtagagttgtaaccacacccaagtttggccactcaccactcaaaagccaaacatgggagactgggttgtgggaggaaaagcagttttgtttggaaagccagcaaacctgagaagatggtgaactagtattctagagaaacatcttcaattgttcaggctggctggaggatttttctggaagggagatgtggggaagaagagaggggtggtatcaagaggtgaccaaggaccacagagatctggtgccagcgaggggccgaggaggatgggaacttctttgtccttgcgtcaagatgcttctgtgaatcttaaacaaaacatagttagttgtttatagactttccctttacttagttttgaaaactacacgattgtggtttttgcattattatctcagtgctctaaaattatcctatcctatcctacgtgcaaaaatgagtaaagaccccttcaacaaaaattgagtgagtgctgtgagttcttttgctgtttcactgttgcagaatgactggatattacagatgtttgcaaaatgccttgaacatattagaagttccctaaaaagccgtccttattattgttgtttgtttggcactttctggctgagttttatttcaacaaatttctaatggcaaactatttttatgttcaaacactgaaagcacaatgtaacaaaacggcgatgttctatagactttggtgtgtacgtgcagcgactggagacaatagatatattttcttgcttttaaaaggagttgtgtgctttaattaagaaaaagagaaagttttctcttagcatattaattatctcgcttgtcatatcaggtatttgttccggatgacaggtcataattagtgcacagaacagactgaaactcccaacgagaagacaggtgtcttggggagctgggactgatggcgttctctggcgtttcaccaggcgcgggaagggcatgcctggaagcagggtctctttggggtcagatgtagggaagaaaaagcaattcatcactgcctctctgagggcccctaagatactgtgccttttccttaaccctccctgggacagttactctttcacacagctttgaggccatgcaacagataagaacggtagaaaaagtcagcactttggttccattcccagatctgccaatgacgatgccagtgaccttgggcaagttactcaggagctctgtgtctctcctgccacagtgcggtggattgaccgggatgggggcacagggtgccaggcacagtgtcggctgcacggtaggaacttcataatcataagcccagctttcttccccacttaccacattcaatcagagttagctattttattaattcacccacacaaagattcagaagtcccacactggatgccttttctgtgctgggcatcagggcagagccgtgaatgtaacctaccccctgccctggagagatctgtgtgcggacagacattggaggagtagggaaaatgctctggcccactgagctccgtcattttcctcctggcaggtattttccatgctgtctcatagatggatggggctgagcatctgacttgtggccaagagccatgagcaacggtggggttcaccgcttccagacctgcctcctacaaggcctttttatctccctgccccttttctttctccatttgccagctggatgcagagggcaaagtggagttccctgaggcccagggaggatgtgaagccaccagaacaaagaggcctgagtccctgagtgaccatgtggagcagagcactctcccagttcttgcccgctgtattagcttgttctcgcattctatagaggaatactcaaggctgggtaatttataaagaaaagaggtttaattggctcacagttctgcaggctgtacaggcatggctccagcatctgcccctggtagggcctttggaagcttccaatcatggtggaagatgaagggggagccagtgcatcacatggaaacagctgaagcaaaagagagggtggaggaggtcccagactcttttaaacaaccagatctcatgtgaactaactgagcaaggactcatcaccaagggttggtactaagccattcataagagatccacccccatgattcaggccctacctctaatactgggaatcacatttcaatgtgagatttggaggggacaaatatccaaaccatatccctagcttaggtgactggttgttgcatggagccgctgagatatgggagttgtgtattgcagccattacatgctctggtgggggccagccagtggggtgcctgggtgggcctggaagtgagatgccagcccctcctcctggtgcaagagcggctgagaaaagccctcatccttgcctccagtcgacatgcacagtgccatgtggtgagggcccagtgatgggatgaaggaaggagccagggagagcccattccccgagaaggctgggccttcctctttgctgttgtggacgctcgcatcagaaacccatacagtctttgagagtgggacactccatcttcttggtgcctgtgtcccctggattagcacaggcctgtcccaggtaggccctccatgtgctagagttgagcacagcagcttctggaaggtgggaaagaaactggtagagaccaaaatggtacaaaagttccttctttcccacacacaggactcactcccagcacctgagaagggaagtgggcgattacctgagtgagatgttcccatctcaacactgtcatcatttaaagactgttgtttgatcttatcatcacaactggtacattacagcacttataggcacttacattagacaaatgttaaatacattatcgagtttaaaatgttattatggtaatagggtgcctgatttcactgcagttcatctgaaaaggtttcagtgcttgagaatatttctatttcaaggttaattaatagataatcatgctgatttgcctcagagggatctccttcgcacacccgggccactgtgagtgtcaatttttattatctgtaaaccttgttgccgacacacccttcccctgggtcctcctgccccaacacattcaagcaaagcgactcagtgctcacaaggagttttgacaagacatgggttccaacacattttattctgttcacaatgtagaaaaaccactgcttcagaacacatgttttaaatattaaagtgctgaaggatacattcaaaaagtacaagaacacataacataatcatctcctcaaggtaatattagcactcaacggccaaaaattgcagcaaagagaaatggttgcatccttggagctacgtcatcctggttgcccaaggtctgttagagcaaaggtccctttctctgcagggcaggtctttcttctgaatcacagaatgttggttctgccattttgaccaatagattagtaaccagttaaacccagactgaaacaatgagctgctagagtttaatttttcctggtaggaattcaatgtagggcactcatcggagaaaaagtcaattaccctctggcatccgctgcttggttacagcagtcactgcctatccatggactaattcaaccagtaaaacatttaatgaccatctacttaaggcagatgcttgcacaaagatcaatcagacccagacccagacccaaacccagagctccatgcctggagccatcggaacctgcacaaagacggtgcggcttttggagggaatctcttctaatccccaaattgatgacctctggaagaatgtgagggaactccgcgatctctgctctgtaagaacatgggcctctgtgccttggttcctggctggtgcctgcctcagacttgctgcctgggttcccccgtgtccccactgctgcctctgcatctcactggcatttctcaagggcccaccctggcccaggcctcttctaggagctttccacgcactctctgattcctcctccccacagagtgctgctgggtgctgagtggatggatggaggttgctgtcacgaggaagtgaagcagcatatggaggaaatttgcagtaccgcacccctcctaggcatccccaggcctgtaacatcactttcctcctctcctctcttcctctccgcacccctcctaggtatccccaggcccataacatcactctcctcctctcctctcttcctctccgcacccctcctagacgtctccaggcccgtaacatcactctcctcctctcctctcttcctctccgcacccctcctaggtgtccccaggcccgtaacatccctctcctctcttcctctccgcaagcacactttacagcttcctttgcagaatgtcgggggagtcaattttagctgtgaggtgttgaaaggccttcctgaaagaggttgttggaggaggagaaggaggaggaggaagagggagacacctgaaaaggaaggggaggaggaggaggaggaggaggagagttggagcaccccaaaggatgggggtggggggcatttgcatggtagggatactccagaatcagcatgtgcaaaggctctcgagggggtgggggtaggtggagtggttcaggcaggaacattctggagtccttggtagatgggcatactgtggttgagggagtaggttggctggatgggtctctgcacagaatatgtagagcagctgcctgattctttgaggtttattattccgaggggcaaagaagcaattgcgtctctcttaccatgcgctgcctttgaacattgctgctgctttagcataacattagattaaatgtgctctttgtctgtctttaaaataaactccctgaaggattaggttgtgattttgttcccaagttaactctcatttatctgaaatcctgtctgtggtagctcagaaatctgggtccattccttcactgacatttcctgtttgtcagcctggcctagcgtaggggaagagttgttaatgcccatccatcccatccagtggccgtcagaataccagagcagggcttacgagcctgtgtcagggcctctgaaggatttagacacaccttgggctgtggcctggagcagtcaaagtgcagggcgggagccctccccacaatccttgcgttctctcaccccctaaatctgtgcccattggaggctggacacagtcctggtgcaggaggcacagtggtgaagatcagcaagccagtgaggtgcctgggtgggcctggaaattagatgccagcccctcttcctggtgcaagaggggctgaaaaaagcccccatccctgcatccggccagcctccaagagccacatcgcctgagctgtgcagcattgacatctttccagagttaacacagataccctgcccagtggggcgtgtgtgagaaacaacgttgagggaatgcacaccctggagcaagggacaggggtcactggaaaggcccctccacacattgcttccaccgcaggggcctccttgcgggcagaggctgcacgggatgcatctttgtccccagatcccacagataaggacgttggtgtctgccctaatggagagttttgctgctctgtgagaggcacacagagcttcaggccctgctcaggcttggtactggctgcggaagcagggggttcaggctgcaggattctcctgagcggcagatgtcctcgtgctttgctttctctcttagccactggggtcacaatgcaatgtaatcagtggtccacactgaccaacaacagggcttcctctgagcagctcctggacagagcaggtccttggtactggtctgaggctctgggtctgatggtcagatctacccccgtattgcaatctgggacacatatttccccaggaagctgtcgggagtgcagaccagcctgatgctgagggtgcagccctgaggttgctggggtctgctttagcccccgatcccatgacctgcacctctgccctgcccactgtccggctgcctctcagcttccaagggaggcctctgggaaccacccaggcttcctgtacggtactttcctttggagcctggatcagtcaggctgagcctggctgtgctgtagaaacaaacaaaccccactttaaagatttctcactcagttaagtccactgcgggtctgcagctccccaggcagctcccttccacttggtgactcagggatccaggaggcctctctgaggatcctcatcttgctgggagagaactctggacactcacctttctccactgccaccggcaactgggaagtctttccatgaagcccaggaaggagcgtaaaattggatgagatactgtagcaatctccatgcaacatccaagctcttccaggagagaaggacaggctgagaggctgggcagacccggactctattcctgccccagcaccctcaggagtgtgtgccgctgggtgggtccccttctgtgcagagcagcaattctcctgagccaaaaagatgtcaggatcaaagttcagctgttcctgaacttgccagcccctgctcacaaaggctgcagagccagaacagagacgaagaagctcctgatgcctgtgcctctgtttaggtggtgtgtgtgtggggtgtatgtgtgtggtgtgtacgtatgtgtgtgtggtgtgtgtgtggtttaggtggtgtgtttgggggggagtgtgtgtgtgtggtgtgtatgtatgtgtgtgctgtggtgtgtggtttaggtggtgtgtggggtgtgtgtgtgtgtggtgtgtacgtgtgtgtggggtgtgtgtgtggtgtgtatgtgtgtttatgtgtgtgtggtgtggtgtgtgtggtttaggtggtgcacgtgtgtgtgtgaggtgtgtgtgtggtgtgtgtgtgttgtgtgtgtgtggtgtgtatgtgtgtggtgtgtgtgtgtgtggtgtgtatgtatgtgtgtgtgtgtggtgtgtgtgtggtgtgtatgtatgtgtgtggtgtgttgtgtgtttatatgcctgtgttaaggttaccggaagtaatgcagcatatctctttagtttcaaattctagataaataacaaatactggttttctagtgtgtgctatggaatatttgaatgcatttatactaaaaatatgaggattgtttatgctgtacttttacttgctaactctgacaagtcgtgtgtgtgtacctgtgcacaacatttcagctaatcttcaaaacaactcgataaagtaggtactattgttctacccattttatagatgacgaaactaaggcacccagagatgaactcacccgggaccaacagcctagatctggtggagccagaaggcccctcacacagcctggccgcagaggctgagccctcagtgggcgccgggaccttctggcagaggctgagagtgttggggaatttcagatccatcctggagggagcctgactgggctttagtggggtggctgccggttggggttctgaagggacgggggacccttgctccacagccaggggcttctgttccacggggcttttccaaagcctccttggccctcctgcttcccttttccctcctccactccccacggtgtggccaagcgggtgaggaagctgagccacaggaattcagactttcccacggtgcccccttaggcggttcctgagtccggggtcccatctgtaaaaccctagcattccctctcctgggagggctcctttcgagaactgaatgctgtcataattgtgtttgtgcagccccgtacagaagcccagattttggcctctccatggcccacacacccccttttgccctaggagtgggccgcggtgacacctgccggctctcccttcacagaccctgccccatccatcctcagtcccatctaccccggccccagaggggtccctcgcccctcagcatcagctggacctcctccagcctccctccaaggcaccatttctggttcccacagtgggaccagggatctctttttccttctctcactggctctggtaacatctcactgagaccccagcgggagttgcagcttcctgatctggaatgatgtgtgtgtgtctgtcaccaggggggccgagctcagatgggcagggatcatgatggctgatgcgtcctggcggctcccagcaccctgcctgcttctgtgtgtgctgagtgttgactggcatgaatccttacggatggtttccatatgcaaatcatgcaaaaacccaacatccccagccccctgtcaaacccaactttcccctgaaatagctgcctctaattgcccttaacacacagcagtgtggctgaacgatgttccgtagctgtgggcattccgaaggaaaatgtgtccttatccccagttataaggggtgttgtgggccaaattacgtaccccaaaaagtcttgtccaaatgctaacccgcagcttctgtgaatatgaccttatttggacatggggtctttgcaggtgtgattaaattaagaatatggagatgagatcatccttaggatttaagttcaaatcctcaaatcagatgacaaatttaatttaatttaatttaatttatttattttgagatggagtcttgctctgtcaccaggctggagtgcagtggcacgatctcagctcactgcaacctccgcctcctgggttcaatcaattctcttgcctcagcctcctgagtggctgggactgcaggtgcagactaccacgcccggctaatttttgtatttttagtagagatgggtttcaccatgttggccaggctggtctcgatctcctgacctcatgatctgcccaccttggcctctcaaagtgctggaattacagtgtgagccaccgcacccagcgtggatgacaaatttttataagagaacagggaatactcaaacacacagaggagaagaccacgtgtccttgaagacagagattggagggatgtggccacaggccaaggatcacctggagccaggaggagctgggagaggcaggaaggatcctcctttgagcttttgaaagaagcgaggcctgtcaactccttgattccagacttctggcgtccagcactgtgagagattgaaccatgagtttgtggcaattagttgtggcatcgcctggaaactgataggaagaatacaaactcttcagagagagggaaaaagtgcatggcattagctgggttttcattgtctgctcatggactcagatttattgaacatctatttgtattagttccaagaaatagaaatactaagaatacaaagcccgtgctctgagaaatacatcaggagaaatttagtacatcaaagacagctactagctccagggacacaggtgccaggcagggcttcgatctgggtcttcactaatgcccttgtctacaggcaatcccaaggcacaagtcatctacccatgagcaaactgagccgcagagcattacacactggtggtaatttaaagaaagagtgtttatgcttaacccaagaggacctcttcagttaggtggtacttgacttaactcttttttattttttattttttttttcttttgagacggagtttcgctcttgttgcccaggctggagtgcaatggtgcgatctcggctcactgcaacctctgcctcccaggttcaagcgattctcctgcctcagcctcctgagtagctgggattacaggcatgtgccaccacacctggctaatgttttgtacttttagtagagacagggtttctccatgttggtcaggctggtctccaactcctgacctcaggtgatctgcccacctcagcctcccaaagtgctgggattacaggcgtgaaacaccgtgcctggccgacttaaatcttaacaaatggatggaaggcagccatacacaatgttggggacaggccacctggttctgggggcaggaggagcaggcagggggcctgggtgcaggtggtctgcgaggaggcagcatacagagtgttgtatgtgtcggggagctgagggggagaggccacagacatgggtacagaccaggagattcaggacagatgctgtgatgagatgggatttcttcctacagaagtcgggagagcctctgaagggttccaagtcgacagaaggactgggtttgagagagagcatgcctgaaggggagaatgcagggagaagggaggccaggaagaggctcttctccacgtgggatggtgagggccggtctagcagcacgaggtgagtgatggagggcagctctaggaggtcaggctgcgtgagggacacaggtggcccaatggatccccgagaagccacatcagctgtcaggagctttgtggacgaggtagaatgctttctgaatcctgagcactgtgcaggacatgggtcctttgtcaactaccatcgaagaataagtggtaattttcggagatgcaaaatgttgggtgcagaatgcgagtccccctcccctgcgggccgtgggctgcttggctgcggggtgagggtggtgggagtgagaacagtgctccctgttttgtgcacattgctactcactgtcgagttcagcatgagtgtggggaacagcccagccagggatttgtctcggggacacagaatgatggggtgcgcagggaagagggtgccgggccacaccctgttttctagcggacggtcgctgtggggtgatgactgcaggccccggtgcaaccttcccttttaaatcatctgaggcggcagaagcatcagctccacagccacgctgccctcttctgttctctccttagaggggagaaggattcatgtctgacttttgaacccgtgtcacctgctcccatttcgccttgccacagagtgcagcaccaggataggagtgataaagtggtggaaggtgccgctccgacttgggacctgccacatcccacatggattctttccctacagaaattcatcgccaggaaaaatgacctggtcaaagtaggatctgggcattcagggcaccttggacataatggtaccctaatattcatttgaatactgtgaaactgccaatattcaaccattgttatctgctaacatggcaatttctgcggccgagtctgtaccagccagtaaggcttgtgtctcatgttcacctcaaacaagctagaaaagagagaacataggaggttcaggcaagaaaagatgcctggtgtaagactatgcgtgtgtgtgcatgtgtgtgcatgcatgaatgtgtgtatgtatgtgtccatgcaagatcatgtgtgtgtgcatgcaacagtgtgtgtatgcatgtgtgcatgcatgagtgtgtgtgcatgcatgactgtgtgcatgcatgactgtgcatgcatgattgtgtgtgtgcatgcatggttgtgtgtacgtgtgtgcatgaatgtgtgtgtgttcatgcatgattgtgtgtatgcatgcatgattgtatgtgtgcatgcatggttgtgtgtgaatgcatgattgtgcatgtgcatgcatgattgtgtgtgtgcatgcatgattatgtgtgtgcatgcatgtgtgtgcatgcatggttgtgtgtatgtgtgtgcatgaatgtgtgtgcatgtgtgtgcatgcatgattgcatgcatgattatgtgtgtgcatgcatgactgtgtatgtgtgcatacatgattgtgtgcatgtgtgcatctgcatgtgaacagggcagggtgtgtaactttcccaagtccctttgagagggcaacacacacagctacactctcagggaatggaggaggcagcaagagggagctagtgtgaagccacttgccttggagcctggacggtgggtccagtatgagctgccctgggcacaggggagttggcttagcactaaagtcgggagctgccagcactggatttgccctagcatgggtcattttctgatgcactatgtacctgcatgttgtatctgctgtttccttgctaactcacccctgttgctaactcacctctctgggatatgagtgcaaggacatttttccatccaggccactgatgtagccccacacctagaacagcccccgaaggacgaaagctctctggaagtattcatggagtggccgatggaactaagggtgtgggcatttgagtgtagctgatttggggagtgctatttatatcacatgtgcttgacattcattctttgctatttttttctcatggaataaaacagtgtctggcacatagtaggtgctggggaaatcgttgttgattgaatacatgaaataataagaaggaatagatatcagattgttttgtttctaagattgagttgccatattaaaaaaataacaatacagggtgtacagttaactttgaattccagataaacacataactttttagtataaatatgtcccaagtaacatgtgggatgcactcatactggaaaattaatctgaaatttaaatttagctgacgatcctgtattttatctggcaattctactctaagaccatgtgaagtatataaattcattgttatttcaggaaagggagctgaaaagcttggacaacatgcctagaatcacagagccagcaagaggctggtccgctgactgatgcccctccccgtgcctcctgcctttaaaagggggcccagggacaggctcccgcacatccctacatttcccaggcaggagactcaggggcagagaggcgggaggctcgctcagaactcagcgccaggttaaagcagttctgggttggaccctgtgctcctgcccctgcccagtgggctggcattcttgccactaccctgaaccttcatatattctttgcccgatttattgaatctctgaggcgctattgcgggaaaacgccaccccacacctctgtctggtttcctggacgttgcctgaaggccagggttcctgctggccgtctgaccttttctcttgttctcttggcggcctttttacagaagatacctttacagccagctacctgggaatcgctgtgcacttttgggccacatctgctggggacaggctgcaagctgagcaaaacctgcttgtttgcttgagctgctccagataatctaatgaaagaaacagggctgattaatcccagatactctactggcgtttaatcccagtgaatgttagacaacaatctcattatgtgcttatgtcttcaacatgacaggcaaggaatgaaattaagccataaaatcaattatttctgcagaaattggcatataagacaaaacatcatcaggaggcgaaagcagtgatgattaggccttcatttcccccgtgctgattgtggagctggcaccacactcgcgatgctccccaaaccatcccgttgcaaggctgggtcctgggcacaaaatggggatttgagaaatgtccttcacagataacgctctcttcttgccacttcctctccctttctctctccttctctctccctctcttcctatctctgtgtctctgcctctctatctctttctgaatcctggtggacattgtgagctgttgcggctgcgtttggggagtcttatgacccacggtgggtctcctgtcctactgcgtggcatgccgggtcccaagggtttgcagagggactgaggagagcgtgactacataattgtacaataaaattgttatagacaccgaggagtagtgaaagtaaaacagaacaaaacattgactcagaagtcagaagacgggtgacaaagctgtgtcacctcccacctcttgagttcttggaaacttttctgccagaggctcagttttcatgtccgcacaaagtggagattgtgggaggtagtttttcaggcctggtgtgacattcctttagaacggatgctggggccgtgtgctgggcaaacctctacacagtaattaggtagccagtgagcacggctgcgagggcgtttgtcatcccaacagcccatattctcagaaataatcacccagaggagcctcggtacagagacggatagggcaggaaccaccagctcctgacctcaaacggaggtgtacagacattcatcagaggtggcagccagctcctgctgcctcatggtgcttccaaggttgaaaaaataaccttccaacacctcctgccctgacacagggttacttctggtagaggtggggagaggaatcgatggagtgagaagcatcctatgacctctatatgacctctattactgggattgttgacaagaaaaattctttaattttttacttctgtaattcacaagcaaatataagtatcgagaacaaggctatttgtagttgtggtttcaagaatccacgccagtgctgtgagtgacctgcgggtgggaagatctttgtgctgggtatgaaaccacaatgacgaccacaaaggaaagatggcatctactgatgttagaggcacttgcttttattctcattagcatttgcccaacaagaactattcaatccttttgacagaagaagcaactgaggctccagaaggcacagtgacttttccaagtcacacagctaaggatagaggcgccaggaagctggcccaggatgagagatggagagctgagattttttcctttcaggtaccactgcacacacccatgaggagagtacatctcacccatcaggcctgggagggtacgtacaaggcaggacgggcctgagagagttccccagcagcccctccctgttgcctagatctaggttatatcagtcctggacgagggcaaacaagaaggactttaacacaagacacccagatctgatgccccctgtttccttgccaggcaggcagctggtggtgaggaagggttgccggtcatccctgggaacttcacccaacagtcaggatggtcagggttggatcgtcttccctcacttaagccccgccaccttctttctcctgcgaggggctcggccccctgccccactggagctcccctatcgccacagtattgggaagttgccattgattaagattgtacggtttgtgcagatggacaaggagtcaccattgactgcaaaagcagatacagcagcagggcccttggtgtgctcttcttctaaacatatgacgccttcatcttccagccagcaccgggaaagccatcttttttccttgggtctggattgaggccaggctgccctgccctctcaatcctgcagagtgatggaagcatgtctgcagagggctgtgttccacctgcccctcacccaccaagagcctacagaaagctggcggtgactggggagcagtggaggatccaaagctcagcaagaagtccaggctggatgcctgcaaaggcagagtctccattgtccactcacaaccacggcctcacgcatgatgggccctgccacatgcctaccgaatccctgtcctcaaagggaagcactttggggtgcagggaaaaccaagtgaacacaaaccatctgcagaaggtaccagagcagcctgatgggaggacagagaaggcacaggcgggggctctgggacagcaaggggacggcccctggagagagctgcaccacaaggctaagggcagaaagtgcaggcacatgggggacagcatgatctatttatcgattcatttaaacatttattgagtgcctactgtttgttagggacggtgctatagccactggaggaagagaaatgaaggagtctattggggaaaaagaaaaagaattaaccgcacttaattatcctgcaatgatcattacagtgagagaaaggtttgcacaaaatgttctggtaatccaggggaggaagagattgaatccagggggaaagacaggatagtagataagagtctaggacctggactggaggggcacatttcaaatcccagctctgtcactcaatagctgtgtgatgctgtgtaacttgtgtaggctctctggcctctgcttcctcatctttaaaatagggataataaaaattatacctggtgtgcagtatggtgtctataggtaataacactgtatcctatacttgaaattggctaagagtaaatcttaagtgttctcacagaacaaaagaagaaaatggtaacaatgtacggtgatggctatgctaattagctaggtgatagtaatcatttcacaatgtatcaggcatcaagttatacactttattatttatttatttatgagacggaatctcgctctgtctcacctaggctggagtgcagtggcatgatctcggcttactgcagcctccatctcctgggttcaagcgattctcctgtctcagcctcccaagtagctgggactacaggtgtgtgccaccacacccagctaattttgtatttttagtagagatggggtttcaccatgttggccaggctggtctcaaactcctctccttaggtgatccatccgcctcggcttcccaaagtggtgggattacaggcatgagccaccgcacccagcctgtacactttaaatacgtacaattctaatagtcaattacaccccaataaagctgaaaataagaaataataatcatacctgcttcattaaggttattgtagtggggtgttggtgttaaccagctctcttgaaaaaaaaagatatgcatatacatctatataagcttattataaattttactataaaataatttcaatccaattcagaaataaagttgcccacatcattgactaatggctgtggttccaacaggaatgttggcagttggcaagattgcctcagtctcccaggtgatcccagcaggaggtgctcttagcagatttctgcattaaagtagacaattactgtggaagatgttaagctgtgcccatgattgcctcagcggtgtacatgacctctgacatgaccttccccagtcctgggcttccactgggttctgaattttctcggacttgagtaaattaaaccctctttctaaagcaatgggctcagcctttagggatgcatttctctcatcttgtttcctcctcttctctggtggaaatcttgtaacagttaatttgatctgcttcttaggctgattctgcctacctcaccaactgcagaaccaacactgagagctgaatcattaaacttttcccttcttttgggtccaagctcaagagttgagtttctctactgttcattcttcttccattatatggcccttgctggcacctcacggtgcctaacttgagaccatctgaacatttattaagtggttttcatttatgtatgtatttattttatttttttgagacagagtctggctctgtcacccaggctggagtgcagtggcatgctcttgactcactgcaacctctgcctcccaggttcaagcaattatcctgcctcagcctcccgagtcgctgggattacaagcgcctgccaccacgcccggctaatttttgtatttttatagacacggggtttcaccatgttggccaggctggtctcgaactcctgacctcaggtgatcctgcctgcctcagcttcccaaagtgctgggattacaggcatgagccaccacaccgggctgagtgtttttctttgttggacaacctgcacatgttttctcagcctcagataacctcaggggacatgggctgtctttagactgatttcacatagttaatattactcagtggtaatttaaatctttatttttcatgaaaacaaattctttatttttcatgaaaacaaatgcagatatgaaatggagtggaatgttcaggaatttaaggtaaataatatcattaagagctcccatgccctaagaggctcctttaggttgtgtggcttagatcatctcccccatattacacatttacttttcttctgatagaagtagttttaggaaaacatctgaagcagtgatagagaacaagcctagcagacagaactatggagcatgaaactgcagaggcagggagaaccaggttgccaaagaggcagagaagtatcctcaaatggcaccgaagatactcatcagggaaaggtagtgcctagtccacttctgttgctataatataataccacaaaacgggtaatttataaataagtttatgtagctcacagttctagaggctgggaagtccaagagcatggtgctggcatcttgcaaggaccttcctgctacagtatgacatggcatgaggctcacaatgtgagaaagcaagaggatgagtgtcagctcaagtctcttcctcttcttataaagccaccaggtccatgatggggacaccaccttgatgaccttatctaattctagttgcttcccaaaggccccacctctaatcaatgtatgatttagggattaattttctaacacatgaaatttgggggagacattcaagccataacagggagactcatgggagccctgggctggggtgtggcctggcttggtcagggctgagcttctggaaatggcagacaaggtcgcagacagtgttgacatgcaaagggctttgctgccccaccattcacagttctgctaccatgagcgtggggctgtttttgattatcaggtactctttatttatttattttttctgagacagagtctcgctctgttgcccaggctggagtgcagtggcacaatctcggctcactgcaagctccgcctccctcctgggttcacgccattctcctgcctcagcctcctgagtagctgggactacaggtgcctgccaccacgtccagctaatattttgtattttttagtagagacggggtttcaccgtgttagccagatggtctcgatctcctgacctggtgatctgcctgccttggcctcccaaagtgctgggattacaggtgtgagccactgcctcaggtactctttccttcagaaacaggctctcttttgttgcacacatttttctcatcacagagtaaagtaaatcaggaagctctcggaagaaaagagatgcccactgtagacaagctgagcagcatttagtcttcagagccaagagaataaactgttagtcaatgatttaattcaactgccttgaatcctaaacagtgttgatgaggttacattactattttggattcaggcagaaggggccatacatggaaattaagaggggaaaaccaatattgagtcaaaatgctaggctcacttaggaaacaattaaataatatctagagggaattgaatattaaagtcaaatgcattctaatgggctaagtggccttttgagcttgctctctcctcaaatcatatattcatatatttccaagtcttgcaagctctgaggcattcacactagggacagcgcatggtatttgcagaatattaagggcatgatgatgtttctcaatagttcacaaataattcaggagttgagctgcttaaatgggagctgtcgtgctgcaatgtggaatgcggtctctgtgtggtatgctggtctgcaggcttttgctgaatgcaatgccaaagcatcaaaatctagaacagggcaggagccttgccaggaactgcttcaaggcaggagcagactgaaactggaagaaggttgcagacacatcttttgaggtgcagaaagctggggacaggactggaggggcaaaagcatttcctagcaatccacaaagctggcagattggttgaaaatcaggaaaagagattcctatgatttggaaagttgatatctgggccccaaggcacaaggagagtcctggaatctcactggtgctcagatcacaggacatgctaaaggagaggtcctgatctcaccctcaaaatgttccagtcaaatgatgaactcaatctaaagcccaggcccaactcaactactgagtggatggattctccccacaccaactccccacaccatggtcgggcaggagcagggtatgctttcttctggagctaaacgttatttactttggtctacttttttttttttttaaacaaacagtctccagaataaaataaatttgacacgacacatgaagaagaaataagaaaaggagacccacggttatgaggaaaaatggccatgaaatgtctagagagggcctggatggtggcatcatctaataaataaggccctttaatatgcctatggcagctatgttaaaggacctcgtagagaggtagaaacaagctggaaatttcaccagatagatggaaactatagaaacatccaaatggaaatgacagaaatgaaaactgagatccagaatgaagattaattaaatggggtcaccagcagattgagcacagctggacattgcctggtgtggccccaggccattcttcacttgtcaattctccttggactcctgggatggttggagcgtgtcccgtacatggcaaatggataagcaacagaggacaatggacaacgcttgctgtctgatattgtctggccccatgtccctacccaaatctcatctcgaattgtaatcctcataattcccacgtgtcgagggagggaccgggtaggaggtgatttgatcatggggctggttttctgcatgctgttctcgtgatagtgagtgagttctcatgagatcagttggctttatgtttgaagttactccttcacatgcccttctctctcctgctgccttgtgaagaaggtgcttgcttccccttcgtcttctgccatgattgtaagtttcctgaggcctccctagccatgtgaaactgtgagtcaattaaacctctttcctttataaattgcccagtcttgggtatttctttatagaagcatgaaaatggactaatacattgtctcatagagtgttgagtatgtgtgggtcccctgtctcattctcacgtgtcatttccaaaacagatcatgagccgaaccaaacatgatggcatggtgaaatatactcctccccttcgagtaggaggaattacaaggttatgtagcaaatggcatgaattaaaatcctgttaaggagggattgaagaattagtgaagaattaggaatgataatctaggctaaaccccaaagaaggcaggccagtgaatgaacctgagtgttgtaagaccttgtgttgttcaggaggtggtaaaactactaatgtaaggttggtagtaatataccaattgtttctattataatatatattttagtcactaaaataataataaatagatatgtaacaaactaatagcaaagaaaatggaataataaaacatactgaaataaaattgtggggtggagggaggggggagggatagcattaggagatatacctaatgctaaatgaccagttaatgggtgcagcacacaaacatggcacatgtatacatatgtaacaaacctgcacgttgtgcacatgtaccctaaaacttaaagtatgataataataaaataaaaaagtagcaaaaaataaaataaaatgaaataaaataaaccaagaagagaaggaaaaaggaaaaagccaggaacagatagaaagcaaaagattagactatagatttaaaccaactacgtagtaattactaggttgaagcatatgaaattatctcttttttgtttaaaaaatctaatattgcagttccacatggttcaatctaatgcactaaatgaaaattaactacatactccaaataagaagcaaagatgatcacataggattcagaaatctcagataacaacaacagtagcaagtagcagaaattaaactgaaatggagcaaagaaaggtgaaggtaaaacgataccaaaagtacccccatgccatcactaactgaagaaaagcttccacagtttaactaatatcagacactgcggactgcaggtggtgagcgatgttagaggaagagaggcatttcataaccacccaaaggccaattcaacaggtagataaaacaattatcaataacagagcaatccacttcatataatatcaaagtatgtgaaccaaaaagttacagaactaagagacagactcatccacaagcgcagactctcaggggccgctgacccagcgttcctacttctggatctgtgctcaacagaagtgtgaatacatgcacagcagaaggagaaaagaagctttcattgtaaaagcctagaattcagaatgtacccaatgtccactaacagtagactggatacatgaactgtggcatattcatatcatacaatattatatacgatacaacaaaatatacagcaacacaaagaacaagatatggctaaacacaacaaacaaatggaccttacaaatacaaagttgtgtatgcaccatatcatttacggaaagttcaatggtattaaccctgagagagtcatgaggaaggcttatggaaggacagtaacatttaattttttatcatctgactcgacacatttccctttataaaaaaccagtgagctataaacttgatttgtacagcttacttcatttatgttctgattcaattaaaaagcctacaaagaagttccatcaggatttttgaataaccatatcagacaggtgatctgactgccagaagaaagtggatggcgtgaagttaaggtcttattcacatgagcccatcctggatttcagcttccatagcaagcatgctcttcaaaggaattaaatgcaaaccagcgaggatgttttacaataccaagggtggaaatccaacccaactccccttttgtaaaacaaagcagtcactgggatcgatcatacactcagcattcaggagtatctggaacccagaacgtcagcaccataggaatgccttctctccctcacccgtcatatctggaacccagaacgtcagcaccaccgtgatgccttctctccctcacccgttccaggtctcatcaacagacccaggtggtaacagcgctcccagctcctctcttctctcagtagggattactcttcctcacccgatgacatcaggcttatcaagacttgtctggcccatggaatgtggcagcactgactcccttggcctttgacaggagccttaggaggcactgactgggcctgcctcattctccatcgtcctggctcatgggtccttcagacagagactcttctttctgctagaatcccaggatgaggaagcacccggagcagcgaccctgcagctgatctgtaacataagaaacaaaggtttcctatctcaagccattgacacttggagattgtttgttaatgcaattaaaaattagcctgtttttggccagatgtggtggctcactcctgtaattttagcactccgggaggctgaggtgagcagatcacttgaggtcaggagttcaagacaagcctggccaacatggtgaaatcctgtctttactaaaaataccaaaattagccggaaatctcttgaacccaagaggcagagattgcagtgagctgagatcatgccactgcactccagcctgggcaacagagcaagactccatctcaaaaaaataaataaataaaaataaaatagtctgttctttttgcttaggattgtcttggctatatgggctcttttttgcttccatatgaaatttaaagtattctaattctgtgaagaatgtcaatggtagtttgatgggaatagcattgaatctataaattactttgcgcagtaggccattttcatgatattgattcttcccatccatgaggatggaatgtttttccatttgtttgtgtcctctcttatttccttgagcagtggtttgtagttccccttgaagaggtccttcacatctcttgtaagttggatgcctagatattttattccctttgtagcaattgcgaatgggagttcactcatgattatgctctctgtttgtctgttgttgatgtataggaatgtttgtgattttcgcacattggttttgtaccctgagactttcctgaagttgcagggaacaacacacaccagggcctatcggagggtggggagcaaggggagggagagcattagggcaaatatctaacgcatgtggggcttaaaacctcaatgacgggttcaaaggtgcagcaaaccaccatggcacatgtatacctatataaaactgcatgttctgcacatgtatcctggaacttaaagtaaaacttaaaaaaaattagcctgaacactgcatgttctcacttacagctgggagctggacagtgagaacacatggacataggaaggggaacaaaactcactggggcctgttggggaggggcttggtggggagaacatcagggaaaagagctaatgcatgctgggcttaatacctaggtgatgggttgacgggtgcagcaaaccaccatggcacacgtttacctgtgtaacaaaactgcagatcccgcatatgtatcctaggacttaaaaaataataataggccaggcgccgtggctcatgtctgtaattccagcactttgggaggccaaggcaggtggatcacaaggtcaggagatcaacaccatcctggctaacacggtgaaaccccgtctttactgaaaatacaaaaaaattagccaagcgtggtggcgggtgcctgtggtcccagttacttgggaggctgaggcaggagaatggtgtgaacccgggaggtggagcttgcagtgagccgagatcccgccactgcactccagcctgggcaacagagcaagactctgtctcaaaaaaataaaattaaattaaataaaattaaagaaaattagcctgaactgattgatacaacttgtaccacatacagagacatgaagcctggagactctgggattacatcctaataactctgcggcccggtgaaataggcctacctgccctgtaaagtttataccatcccgggtctgtaagggctcatgtgtccacttccagaacaaacctctggcaaggatggatttctgtaattactctgggttagtagtgtgacaatcttgaggtcagagggagcagtcttctctgtaaattcacagtttgaacaaagccttctgaaagagatcattgttttgctttgcatgtacaaacaataaatgtacactgtagttatcacatggagttatgtaacctatttggtggttatttattttgtgaaataccaaccaatgggacaagatccctgggcatggtcagggaaaagaacccagacatctcataacctaagggatttcaaacactcataacacttctcactgtgagttaggctggttctgaggagttttctcattccacgatgtgctgcatagcatgtggaccagccaactgatctttgcctgtagtatatacattttttgagacagggtctcgctctgttgcccaggttggagttgcagtggtgccatctcagctcactgcaacctccagctcctgggcttgagtgatcctcccacctcagcctctcaagtagctgggactataaatgcacacagccactcctggctctgtttttttgttttattttattttttagagacagggcttactatgttgctcagtctggtcttgaactcctgggctaaagctatcctcccacctcagctttccaaagtgctgggattacagtcatgagccaccgtgcccagcctggctatactattgacctcaggactgccaccatccatggctactgaagagttggataatttcgtctacaaaattgaatacatgtttgtccttgaacccagttgtctttattgtttatcaatgaatgctcccaggacaaaccctgctttccaaaactgaaatctgagattcactctacccctcttgctaccagagcccattgcattagttctctgttgctgcttttacaaattaccccaaatttagtggagcaaaacaacacaaatttattagcttatagctctacagtcagaggtctgatagagtctgaagcatcatcagggctgcctgcctctctggagacattgagggaagtctgtttccttgctgtttcccgtcttagaggctgtccacattccttggcttgcagcatccacctctatctccaaagccagcaagacaggttgaatctttttcaccgtgctttacggtgaccttgcttctgttgtcctttctctctcggactttctcctctgccactctcctcttttgagacccctggattatgttgcctccacctccagggaatccaggataatctgcctatttcagtcagttgattagcagccttaattcctgcaacctcgattcccgtttgccctgttatgaaaccgacccgtttgcagcttccaaggagtagggcgtcggcctcctttgggcgttattctgctgaacacaccaagtgaacaccaacacctgccgacccatcttcttaacatcctgggtcctgcaggggttcccactcacagctccagttccattctccaccctccctactttgagctgtatgtttagggaacctcatttccaggtctgcctgggtcatggctccttttagtctcagcagatcctggtttggataattaattagatggttactctatcctgctgcacgtgcctggccacttaatagttccccagccatggggagccgcctcacatctacggcctttctactgttctgcccttccaggagatctctgcattccaacccacatccatgtggaaatataacttatctttcaagggtaaactgctgtgtcccatcttttgtgaaattgtcctgttctgtggaggtttatctgatcatatctgctcttatgctgagcttgcatctcacatggctctgatacacagtgtcgagtacaatggaactgtgtttgttatttctcctctcctgacgccgaacttcttgaaggcagaggtagctcaggtctccaggcacaaatcaaagagccctgcatgagtcaaatctcagtaagcaatggatggagttgaactaacttggcgtccaccctcttttataaaaaatgaaaacccttagagagacccagtctcctccctccattgcacataaaaatcagttaagtccgggcgcagtggctcacgcctataatcccagcactttgggagactgaggcaggttgatcacgaggtcaggaattcgagaccagcttgaccaacgtggtgaaaccctgtccctactaaaaatacaaaattagccaggcgtggtggcatatgcctgtaatcccagctactcaggaggctgaggcaggagaattgcttgaatctggaaggtggcagttgcagtgagccaagatcgtgccactgcactccagcctgggagacagagcgagactctgtctcaaaataataataataataatgttactgtacagagatatcactaagtacttattagggtctttttaagttttattcattaaaaactataagctgttaagtttagaagaattatatatatcttaaaaatcactgttatgtcaacccaaaggaattgattgacctaggcaatgatcatcaatggatacattcattagatgaatgatgggtggagaatttgacaatggacaaattaaattgctaccacctatattccctgattgtccctcaggataggacaaccataaagtgtgtccccagtgtgaaaagtactctttagtatcatatttaaagtattcatatttaaagtactctttagtatcatatttaaagtattcatatttaaagtactctttagtatcatatttaaagtattcatatttaaagtactctttagtatcatatttaaagtattttaaagatgctaaagtatcatatttaaactattcttgctcaaaacattacatcttaaactactcaaggttctaccttccatttacaaaaacatggggaatagaagatgaactcaaatgacaccacaaggaacaaccagacaaatcatctacggctggaatgtacaggacaagtaatataatgttgggaaaaaagttaatgcacaaaacaaaagggggccagggacttctgagcaataaagagacttaagagactccacttgaatcaatgtgtctaccttgttggattctgattcaaactgaccgactggataaagatgttcatgagtgggcagagaggcatgactatgggctgggcatggggtacatgtaagaatttattgttcattgtgccagatgtaataatggcattttggttatagataaaaacttctattttttagagctatacactgaagtctttaggagtgaaatgatacaatatctgacattcatcaaaaacagatgcaaaatgttataaatgaatagatgaagcagttatgaaagataaaacctctctacctttaagcacgtttgaaattttgcacaaaccccttttttaaaaatagaaatcattgattgtatgtctaaaatgattaagttagtgaataaaatagttttctcccaactatgcagcaaatattttcaccagtaaatggggaagtcagacctgagaatcggggaaggctgtttgagctaactctgtcatgatacataatcacctagtgccgtccttattttacacttgacaggttatgtggccaagcagctttcgtgagttgctgtaaactctgtttctggtctttccaagcagcaggccagcttccctttcccctctaccctccacagtgcctcccacagtcttcttcacacaatagatattcagcacttacccttcgagtgaatgaggggatggatggctgggtctttgcacacttgcgataccatagcttatgaatgaatggatgaggctaataaaaaagaccatgttttgcactgaaattgcttcatggtccttctgggtccagagactctttatctatagacattgtgtctataaatccatatctaccaggccaggctcttgagtgaatgacttaccaacatcccactgctgccccaaggattctgaaagacgaagagaccattcaaaatcaaagggaagattatttccccactgagagctgcatacactgaaaggtagggagctgagggtgaaaaaactcactactactagatctggtgtagttcaagttcatgaatctcagcactgatctctcagcctgtttcttgcataaataaaacagaggcactggtttgcatgagaatctcataatgcgctatgaaatccatgccagagtcaggcatctaatttaagaattatttctcgattttgtgtctcacatcctgcttctgcctctttctgctgattggattcttcccttccctttccctaacaagcttgtctccccctctccctgcacctcctcctctgatctttccctcctgccttcacctcttcctctctccctaataaagtgaccctggcctggctagatatctgtgagttggcagagaggtcaagacaggtcatatgccaaatgccctctccaccagatctggggcaggtgggttgggtttagaaacacaaggaagagatgtgggctcagcttgggttgggtctccagaagtctgggtgctggcacaggctctgtgactgacaaggaacaaagcacaatctgttgtttctgagccttgtctccgcctgaggacctcatgctggtcaaccgtgtttctctctctttccaccgattctggagacaaggctcacagctgagtagagaggaagcagagcagtagcaagggtgctgctgatgctgctcagataccttgcctggttctgacaagcggtttccactccccacccagttctacacgtgtccctgcactggggaaggctctctctggggtcacggtgggtgggggacagcacagccagagtccctgtattccgaggacttgggttcttacgaagggagacggataataaacacattagataagtacatgaacaagtggatgtccagcacttactgcgctttgggaaagatgaagatgaagtaatgcctcagagaatgttcctgggggtagagaaggaggagatgctgagaaaagctccaagtctccgggagaaggtgacagctggccgtggcctcaacgaggagcggccgcatggagatccaggagaaaacgtcccaaacgaaagaacaagcggttggtgccctggatcaagagtgagtctgtgggctccagggccaaagatgtggccagcgtgggtgtgcattgtgggtgaggggagatacagaggaggatggagccagctggggtcaggcctggattcatgggctactatagcttttattctgagtgaggaggttttacgattaaggtgttgtgacctggagagccttatgctgcttccaaaactcccgggctggtgtagaaaagcagaagaggaatcaggtggctagagaggggctgtcctgccaatgtgggcacaggggatgctggcttggaggagggccacagctgtgaaggtggatagcggtgacgggctgtgccaaggttttgtacatgagctgcaaagaaaaacaccattcagagaccactgacttctggtctgaacatcaggtgctggtctatagttttccaaaacagagaaaactagaggagccacggatgtacaggataaagtcaacggctctgcttttccaggaaagactgtgacacatggaaaacatccaggtagaagtgtcgtggggtagctggatgcacaagagtctgaagctcaaagccagggctcgggctgcagatagaaacttgagagttctcagcacgtagacgttctctagagctgggactaggcaggtcacccaaggaggacacacagctagggacaaaggagggatgaaggaggggcttgaagtggtttccctggagctgagattgcagagaggagacggggcccacagaagagatgaggagggcttgttccagacaacatggtgcctctttatcaagcacagccatgaatcctggaattcatgtcagagggagccactgcagaacttggaaaagtggcaagaggaaggcgaactgtctggaaaccaaacccgagtgtcggaggaagagcagagtggaagggtgccttctgcccccaacccaacagaagcaagggatctggcctttcccatcccccaggttggcaatggaagccagccttggtggactcattcctgtcctagacccaagcggagtccctcctatagtaacaggtgaacccagacccgccaccaggtggatcagttgggagctttgccaaaagtaagtggcctgcggagactccttccctatcaggcctgagaccccccctccccaacctagagatgcaggcatagctgggacagtggcaagagggacagccaaaaggaatggtgaagcctgggaatcacctctgccctgcaagcctgagactcctctccccacacggacagtggggacccggggggtggtcccagtggggtggggagatcccaccacaatgactatccagccaaggaagcctgagactctcctccctcatggagagatgcggatgacctggtctgcagaagctcctcctgccctgaggtcgctcccacagggacccacggaagctcctccagcaccagatacaccaagcagctcaaacaatagcacaaagactctgaaaattaaactgtcattagaaccccagcccacaaaagtaggcaagagggaaactaaaagaatttgtggcttgcagatttacttttaaagattggataaagaaaactctttcaacagaaaagaaataaaaaatgaagaaatcatgaaacatcagaaaggaagaaaacaggagcatgggtaggtatcatgagcacactattcccttcctcctgaatggtctaaatcacacacgatgattgaaataaaaatcacgttaccatctgatactcaagacgatatttaaaactggtgagggcaaaggtgcctgaatggaagtaaggtgttcacacctcacatgaagacacactgatactcatagagaaaaaatgcaaagcaattggaaggctgggcttttcaacaaatggtgctggagcaattgttcatccttaggaaaattaaatgaaccccccaaactaaacttcacgccttatacaaaaatgaactggaaatgattcatgaacttaactgtaaatgagaaatctgtacaacttttagaagaaacaatttaaaaatattaggaatcttatgctaaaaaagaattcttcaacaacagcaaaacaatccatgaaagaaaaaatgtttaactgaacactttgggtcaaaatgatgattcttttttttttttttttttactctgaaaaaaagccatgtgaagaggataaaaagacaagttacaaacagggagaaaatatttgcaaatcacatatctgacaaaagattagtatctagagtttataaagaattcttaaaattcaacagtgaaaaaacaacctgattataaaatgggcaaaaggcatttggagacaatttcatgtagagtatgtacagatggcaagtaagcacatggaaaatgttgagcgtcattagccattggaaaaatagaaattaaaactacaatgggatatcgctgcatctctactaaagtggctgaaataaaaaaatagtgatgatcctaaatgctggcaaagatacagagaagccaaatcactcagacatcacgggtggaaatgcaatacagccactccggaaaacaaccgggcagtttcttacaaaacattcagttgcattcttgggtatttactctaggaaatcttatattcacatacaaacctcgacatgaatgttcatagaggctttatttgtaataaccacaaaccagaaacatcccacgtgccctcagtggttaaacaaagtgtacctaatgccatggaaaccacttagcaataagaaaggaattcttgtggtgatagactcgttctgtgtctagactgtcctggtgcatatgtgaacccagcatgtggcaaaaatgtgcagaactaaatacacacacacacacacacacacacgagcaagtagaactggaaatctgaataagatctatgggttgatcagtcaataccctggttgtgatgttgcactagttttgcaacatattttctttggtggaaactgggtaaagggtacacaggatctctctgtattatgttttacaactgcatgtaaatctgcaattcaataagaatttttaaaattttttttatttttgagacggagtctcgctctgttgcccaggctggagtgcagtggcgccatctcagctcactgcatcctctgtctcctgggttcaagtgattctcctgcctcagcctaccaagtagctgggattacaggcatgcaccaccatgcccagctaatttttctatttttagtggagatggggtttcaccatgttggccaggctggtctcgatcttctgacctcaggtgatccacccgcatcccaatgtgctcggattacagctgtgagccaccactcccgacccaagaatatttctaaaaatgaaaagagagaagagcggagatacaggactccagttgagtagagtgacacagaagaaacaagatgagaacaaatttacatgtagaaacactcatcaggtatgttctcagtgcttcctgtaactcgctgaaacttcacaggatcccatgagatgagaaatgctattttatttggcagaggatgaccctaaaatgtagagagattaaataatgttcccacagtcacacagttgataagccctgctttcatgggcagcacagcgtagttgtggaaggaaacattaaatagtccaccaagtgacgtgtaaatggtaagtgcaagacagtaagattcctgagggcaggaactcagtgcatttgttcgctgttgtatactgagcacttaagaaaaggcctggcatggggcaggtgccaggaaaagaagcaggagccagcaatctatggggaacaggctatcagttgaggagcggagtcaggcatgttttggcaaatgacatttaagcagacattggagtgatgagtagcagttggctagatcagatcctcattccaaacattccaatgggattctatctcccttggaatgaatccaaggtccttatcctacaaggcttctgggacctggctcctggccatctctctgccctcatctcctcctgccttcttctcttcctgtaggctcccttccttgaacatcccaagcccacgcccatctcaggacatgtgcaccagctgttcctgtagcctgaaatctcctccctcaaacacacaggactcaactcactcccacagctccctgctcaagtgtcgccttaagagaggccatccccacccacccacataaaatcatgtcccacctgtgtcgttccacttccctgaccctgccttattttccactgtgcttcttcccaccatctggaagatatgtttgctctctgcctcctgacgccgaaaaagttgtgtacacagggacatttctctttggtttgtctaatgctgcatcttcattccccagaagggggacaggggtgtgtgtgtgtgtgtaatggttgaagagaagtggaaactgggcatcagtgcatggatgtgcactgactctgtggctctgccactgcacggggaaatgtggttggtgaggtgaggcagtgaggagatgaacccatgccagtcacagtgtgaactgagagcccacatttcatgaaagcagggacctggggaaagagaaactacttcccatggccaagggagatgccaggatcagagtctttgtgaagacaaaatggaagtcttcctggagaaatcaaaacctaggcctgcgcctcccctgtgtgaatctgttgcccccttgtggctggggattacctaagccaaagaaattttcttctaggttcatgtgaccccgagattggctgggagaagtaaatgtagagcagagctagaagagaaaagccttaatcaaattattgcatattctcactgaagatgagctcataatcccaaattacaaaacatacgatgagtgagagaaaacagacagtgtgagcagccaggtttgatcaatctgaactagagtataaagaagtataattacacaaattaagggcataaaagtataaagtaggaaacagtaagtagaattgcaatagggccaaatagaacttctagaggtaaaaattacacacatacagaatctaaggcccttggtcatgttgaacagcagattagatatagctgaaaggaaagaattaataaggtgaaagataaaaccaaggaaattaaccaggatgcagcacagagagataaagcttttgcctgcaaatgtctttattttgtcctcactgttgaattatcgtttagatagctggaaagagacttgtatgtttactgttatcttcccttggcacattcaatatattatagactttattccattattgtatgaccttcatttacttatcatttacgaacatttgttgtaaacctacagtaattaggagagtatgatatcaatgcagggatagacgaatgggtaaatggaacaaggaaggagcccagaagtagatccacgtatacattggtataaaacagagtcagccttacaattcagtaggcaaagagtgagctattcgctagtgttgggacgtaggttttccatatgaaataaaaatacaatagagctataacccacatcacacatacactccaggttgattaaagaactgaacaactaaagcagaaccctaaacctttcaaaactcaatagaatatctgtgtggcctctggttagaaaataatatcttaaataagacacatgatgtgcatatgcgataaagaaaaattaaagtatcaaaacttgcatccagacatctaaatctcaaaaacataatatggatcaggaacatgaatttcaaagtatacataaaatacaacataagatataaatgacttttaaaatttaaaaacatgtggagcaacgaaatctgtaggttctggataaacatacatgtaagaatgttacacgcccacaaaattaacaatgctgaattcaggataccggttgctgcttctggaactggggcacagaggcaggttttgggctagaaacaagtgaatgaggtacttcaaccctaacccttaacgttttatttttaaaagaaagtcatccaaaccaaatacagcaaaatactgtgttttgagaaattcaagtggcaggtatgaaattattcatgattccctatatggctgcctgaaatattacacagaaataaaggaagaaaatgttaaatatgtacataagggtgctggaattattaactgcggatctgaaggtacctggaatcaccctggtgtgactattccttattgtttctctcctctagagagtctctaaatgagttgacctttttttttaattagtcaacttcaaggtgacaatctgttgctttcaaccaagcgagtgctgactgatggagaatcctgctgctgcatcctgcacaggcgctcctggcacagtaaatcaccgacctgatttctgggcaaaactcagcacattggactccttgtcttactggatcgtggacattctcaacaacccctgcgagccaggggatcacgcggaatctcagcagttctctgggatccactgctccttcctcactctcatccaaggggctttgccagcactgagcaagtgacacccaggtcgccgcatggccgctcctccccctccgctcctgcctctaatctcctcctgcggaacgggtgggagctctgggcacttacacttatttatggtcatgtactgctggaacttaatgatacataaatctcaaattatgaagtcacagctctccatattcctggctcaaaatgatcctcaggataaaattaccagggaagcaaacaggagggcaccgtctagtgttgaggattgctctggatagctgggggaaacaagtctttcccaggaagcacatgattcaaatgccagaggatttgctcattcttgaataaatgaatgaatgtgtgaaagaagacatctgcaaaaatacatgttcttattattcatgtttacagaagaaggaggctcagagacacaatgttgacagggccgaggcctggcactacagaattactgacggacagatcaatcacttctctctgaggatacagcctggggagcattaggatcagcttactcagggcacctcaccctttcttgctaccagctctagagtcttgtagatgatcttgagaatctccctagggtttcttgcccccacctaatttccctaaacccttcctcctcctgacttccttttcttctccatcaagtcctcagcctaggttcatttttcctctatagacgctggtttctccttgctctgacctcgtggcatttcctttgcctttccttcctcgtcctggctgagatccagctttgtgtccttcatcctttctcccctgcccctttctgcctccccagcttctcacggtggacagagacattccgagatcctttgctcggttttctctttcaggctggagtgcagcaggctgggcatggctgccttccttcctcacatccccatgctctggaaagccctcagaggacctgggtctcacctccacagtcccgtggctccctgcccctgcaggctggactcgcccctgggcttggaccacctccagccagactccagtggtgtgatagagagggctcaggatagggggttctgcgaactgactcatcacccccaagcaagtgataacctcactaaggctcagtcctaataatcctgctatattaacaacctctatacttttgaaactgacccctagtcccataaacagttttttgtttttgttttgataaacatagaaatggatgcttctggtcttaaagcttgaaacttgtatttgttttatgagttcctttttcaggaaagggcccccaggcctctcaaaagcatcaaagaactgaaactcactagatcatctcatccagacagtgagatgtcagacccttcattcaccctgattgcttccttacccctctgagctcctcttttcccatacattgttacatttcttccctgctatataaacccctaattttagctggtcattgagatggatttgagaatctcctgggctgcagcaccaataaagctttcttccttggtgatactctttgtctcagggactggctttctgtgcagtgagcagcaggacccagaaggaacccatgatgttttggtaacacctgttgtcgacttgtctctaaagtgtcatgtagtgagaccccgtctcagaaatacactagggactcagagtgttgccatgtcctcggtagcttttgggattagtcttcatttcattcacatattaaaggctgtggtttttgtgttattgccttgacagccagtgcctggttcccttccctgagtctttttcctgtctgggtttcctcttcctcacccttctgttgtagaactcacctttgcctttaccctgttaaagaaaaccagagctgggcagtagttaaaagcggcaaaatatattttactcacgacaattgcagcaggggaaagagactttggcatagaactggctcaagtccaaacatagcatgacaaccggggattcacagccagggaggagggtggggtcaggggatgggaagtcactgagaagacatcagggtgagggggagtctggctaaatggacctaataggattcttgctgaagacagaccaaggtgaccgacatcacctgggggatggtggagaacaggaatttggtcagatattggaggtgatcagttatggagctggggatttttggctaaaccgacttgacggagttttgctaaaactgagcgatgcaaagatgagcagagacaccctcaagggtggccgagtctagaagaggctcagaggagcctgacagcaggcagcccctttctctgttctagaattgagagccctttctctcctttgcaaccgacatgccacatctttgtgtcccagggccccaagggaccagcctgtggcctcgggctgtctgaggacctccccacccaggcttctgtgagttttctgtgacttcccttcctggcgtttctctcctcggcctcagcgctgcagcagacatggttcttgggtccagtcacattagtgatgaatgaccctctccagcctccactgcctggcgaggtggagcccatgatcaaagttgccctgaaggtggagccctgcagcggcagctgggcgaggcccggggcatgtgctcaggaactgcatcaggaggggcctcttctttctccccgccttctgtgccaccagctctgtccctctatggggcagccgactcacacccatagagtgggctaggcatgtctttgccagtgccatgagctccctgccccttctgcatgagactctgtggggtgcaggcagcagctcagtcatcctctctacagatgaagagaaacccgggatgccccatggccacacaccacaccagaggcccagcaggaaaaaactgggcctcctgattcctgcctttcttcattccatcacacgcaaactgctggagcgtggtgctcaggaagagccatcgggtccctgagctggtccatgtcactccaaagtgaggggctcctgcaaacatggcgtgtaaggagcgggtgtttaaaaaatgggcacttgcaatgaatttggggtcagctctacttgcagtcccagtcagaactatccctccctacctgccagccaccaccccacaccccaccacccaacagcccaccatacatactcctgagacagacattttaatatattttttctactctctaccttggctcctggtctctggacgctccagggctctcccagcatagcgccagggccttctttaattaggagcggcttctctgtggttctataaaggtccagcagcccaggggtttatataagatcaggaatggccatcagtgatgttgatttcaagaacattggggctactgtgagacagaccgaggagctcagcatcactggcatacacattggtcacaggcacatacaacaggccacaggtacacacaccaggctaccagcacacatgccaagacacaagcaggaatggtcaggaggggttgagccccaggacgagctggataggttcttcctttccccaaaagaacagataaaagtagcaggacttgtgctccaggatctgactctggtcaccgcaggcctttgctcctacctccagcctccaaggcaggggccagtcaccagcaaacccattattttcaagagcatgtgaatgcatcttccagcttcaaattcttaataatcatttagactatggaaggtgacattggtattcccattgtacagatgaggaagctgacagctcaggaaggccagtgattgacatgaatttacacagccctcctgtagggccaggtttcgggccctctcctgtctgttccagtgtcctcttttaattctctcctttgcagagaacctaccacaatccctgcccagggaaatccgctgccggccacattgaggcacccctggaggaggacggggaggcagggagaagcagagtctcagccccggccacactgctgtctgaggcacccctggaggagtacagggaggcagggagaagcagagtctcagtccccagtaccccaagtgaggaccagggtgtggagaccagcagctcccctgggatcaaaggcatgtcctattcctgggggccgtgcagagccctgacgacgtgcatgagtaaaggctcacagtgcctcatccgcctgaaggatgctctggggagacagcagctcatctccaagtgggtcagagcaagttctggagacttcctctctctcttttgctctcaaacaggcagcacataaattgagctcccggtgacctccaggagagagagatcaccagggagagaattgctggtgcacccgcgggttgctggcagtgagaagcacggagcgcggcagggagagggaccggcatgaggactccttggagcccttaagaaaggtgctgcttcctttacctttcaagttcataaagttttgttcttctaagttgtgagagaaaggaatttgtgatttatttgagaaggttttctgaaaaatctttttcacagttagccaagagctgacctgttgggaagatagatgaacagctcgagtcataaagattcctaagtgacgtttctgtgcaggttattttcaggggggtcattgccacggaattgcaactgcagacccgtacttggcacctggctctgttaggaaagaaaaacaggtgtggaagatccagcccaggggccatgtgcaatgaagattttcatttctcccggtccctgggagatagacacattcatctgacctctcaaactcataactggccccaacctcctgtgcaggagggacagggcataaggccaacgttagaagactaagcacagtcagcacagtcctcctctaccgaggctgggcagctaggatggaccccacatccctcagatctgtggttcagatccttggtcccccagatgctccccaagggccgggctccgagtctggtattttccttctgagatctgggcacaaccactcaggccagaagggtgctatgggacttacagggggtggggaggaagctaaggaattgaatctcacccgctttcttactgcacttatgttccacatctgaagatgggcgtgtgctgactacgttgccttgttcgtagtggattcatttgctctaaggtgtcactgattgtcattgattacttatgtaccataagacaggaaaaatgaaattgtcaacgtggatcaaagcaaatgacctaggcaaatctcaatcattttaggtttatttgccaaaattaaggacgcgcatccaagagacagatgtatgcctttctctgaagatgattttgagggctttaatatttaaaggggaaagggcaggatactgaaaaatacataatttcatgtgccgggagggtaggagaaacagccattcatgcctttgtctgcgtcaggcaatctgcatttttacataaggtaatgtagacaagagggcagaggaagcaatgaaatatgcatttgtctcaggtgagcagggggatgactctgagttctggcctgtgttcctgtgtctgggaagataagcgatcaatttacgttgcaggatgcacttcagcagaactgttttagggtgatgatcttgggggccaccaggaatttccttctgggcaaaatgtgagggaggtatgtagcttttcatctttgtagccgtctttttcaggagtaaagatgggagacaggtttgtgtggtccagttcccagctcgacttttccctttggctgagtgagttcggggtccccagatctattttcctttcacgcccaattaaatttatctatgcattgctctcccataacttggaattagtatattagtatatatcacatactttaaacctatatcacttttgtgggtacataaggaaaacagaagtggaataaatttggtaatgtatttgtgttcatttcttatcaatgtggtaacaaattgtcactaatttcgtgacttaacacaacacacatttattattaggttggtgcaaaagtaattgcagtttctgccattaaaagggcaacaaccacaattgtgtttgcaccaccatagtatcttgtggttctgtatgtcagacttctgacatgggcatcaccggatgacagtcttggtgtcacagggctgattccttctggaggctccaggggaaatccatttccttgccttcttcagcttctaggctgcctgtgttcctcggctgaaggatccttgcttccctttcaaagccaacagacacctaccatcttgaaatctctctgacctgaactcttctgcctcccttttctacttttaaagagcctttgattacaccggccccacctggatcatccaggccactctccctatgctaaggtcaactgaggagcaaccttaattccttctgcaaccttaatgcctccttgctgtgtaacagcattcacagcttctgggattaggtcatggacattttcaggggccattattctgcctaccaatcgtagtatccttaaaactttaaacaagtatttacaacccaacactctgaaacttttttgattaggaattgcctatatttctgtttttcacaatcatcctctgccctccagagcatctgggcagcattcatgaagggagtgccccacgtgaagatccaggatttatttcccagtcactgcacctgttctgcaagctttggcatgcatgcctagacaatgaccattacataaagaccactgtgtggttaacagacatggcaaggacatccagatttcagaggttttaaaatgtggaagaagatgtatcatggaattgatgaaatatggcattctttaatattacagacaatgagtatcagaaagcatttgatacttgatagcatttgatacttaatcagttgtaatatcagcttatacttaaaattatctgtaagtaatatatgtaagtaagctttatgatggacaggaaacataattttctttatggttcaaagctgtatctgaagttcctggaagaatatcaggaacaaagtaggtgttcaggaagtatgtgttgaatgaatgagacatattaattaagtgaatgggctaatggatgaaggaataaatgaatccattcagtgaaatctattattattttattcagataagagttattgagagccattaagtgtattaaattatagaatgctgcatgttgtctgtgtaaaggatgccctttgagagatagttatctcctcttcttgcctcccattcattcagcaggacagagtgacccagaagagcagagaggccagtggttcctagcccctcgcacacagcatgtgctcattgaaaactgtgagtgaatggagagtggatggagccatggacacttggacagatggatggatggttgcacagatggatggttggttgtcagcataaagaaatgcctgttaacggggcctctgatgcttttggttatcctccagtaggaaggattatggatgatccgttttacttgccttgaactctgggtggcttagcacacattcttggaaacaaagacccatggataccctcatgagatgacccagaaagtcaggactttccagagggagaaggctgaagaaacactgagccataaagctcagaagatcccaggctgcaaagccatcgactatctgaaggaggccggccccctttactgcaggcactgctggctctgagtgtgtctgtgcctgctggctgattccctgtgtgtcagacccgggacacatcacctcggggtgagaatgtgtaacatcttcgtgtgtgggtgtagcagctgcagtgggaacatgtctgaatgactttgcacagttctggatggcaaataaatgtttaaataggtgcatcctaggaggtacacttcagatcagctctcacagtctaagcatcacttcctcatgcaaagcactctctgctgggctttgacctcttgagctccttccctgttatgtaatagtatctaccaaccaaatgaaaactgggggtgccccctaaggctccagcctgtgaaggtggagagcctcctgcagagtcacatgtctgcaaccttgttaggttgtgactctggcgattccatgaggggtgagagttatggctggtaacttagtaatttgcatgcagggagaagcacccaagatctgttgattactcggcccattctttctgacccagtcaaagacgagcccttcctggaagaagccacgtgggccccggggagggaattgtgttagtaaatttaccggctcatcctcttccacatccatgactctgtgggcagagagaaaactcagagtcccaaaaaggtgccagcagatcaaagggaggtgtagacttaatttcaggataacatatttatacaacatcttttatttttagaatttcatattggggtctaaaacctcgaactccagtggaagaaaccacttgcatttccaagggggtgaccctcgaagttctttttccaggggaaagacatttaatttcatcttgtcttcccatatttgttcctgttagattacattaaacgagttatttttaatcattgttcataaatcacagcaagggtacgccctgaggcacaaaacatttgcataaaaatattaattgccactatctctcctttggggttcgtgggaaattaatgtgcaggcagccagtggcaggcacgagggcggatagaggacaggatgaaggaaatggcctccctcaggctttatgtcctcccctgagaagtctccatcagttcacaatgtgccactcagaacttcaggattctcctcagatgtctcctcctacatggagcctgcctggatttctcctgtgtcacctgtgcgccatgactgaacccctcttaggaaacttgaacatccttccgatttcacacatctgcggacgtgtccccacgtggactgggaggccgctgcctgtggttcctgccagagcacagagtgaccagcagaagaatgaggtggggctgccctctgtctcctgcacaggcttcccccacagtctgtgcttcctgaatacaggcgcacatgatgttctctctgaatttacccttttaattaaaaacaggagtcattagaccatgagctgagcccaagtccccgattccaaaacagaaagcagactgttgtgttctgcttctataaaccaccattgcagcctgcatctctcccactgcattgctcaccaagagcaaggcacgcattaggaagcatggcaacgtgtctacccaggccaggaattctgtaaaccagagccttaatctccaaagcaggcctcacagcaggaggtgagcagtgggcaagtgaagcttcatctgtgttcatggctgctcctctccccatcactcacattaccgccagagctccaccttctcttaggttagtggcggcattggattctcagaggagcgtggatcctattgtgaactgcacatgccagagatctaggctgcatgctctttatgagactctaatgcctgatgatccttcactgtctccaatcacccccagatgggaccagctagttgcaggaaaacaagctcagggctccctctgattctacatgatggtgacttgtataattatttcattacatattacaatataataataatagaaataaaatgcataataaatgtaatgtgcctgaatcatcccaaaaccaccccccctcaccctagtccaaggaaaaaaaaatggttggggactgctgctgcagaccatgtgtccactcaggagtgcagatccagaagagaagggaagggagaaggcaggtggggtttggacggctgtgctggtttatccactctccattgccccatgcccgtggtataaatacccctgctgtggctgaacttgggtgaccatcagggtatcattggccttgtcatcggctctcctgagctcctacacgtgggcttccatgcaccacccggatgagtactggcttcttgtttcttttagttttctttgcttatttatgtgtttttgcaagaggagaggcatagccctgaagtgacatctgttgtgctgcaatcgagattccagtgccaagttaaagacaacttccaaatataagggttgttacatatttagttcagggctagcacaacagcacggcagtttgacccacattacagaaacttttttgtatgtaagtgaaaggtattattgacagtaagtttataagtgactagaagggctttggctagagaagattcacagtattgccatgagatcttgtgaaggaaacagagagtgactgaatttggctgacatcatgaaggtctaaggcagcagataagctgccttcttctgcttccattttgttattttatttgtccattcatttattgattcatgggttgttgtgttcctaccatctaccagtcacggtattaaatctaccagtcatggtattaaatctaccagtcatggtattaaatgctgtgacttggaggtgaaaaccgaggcacaatgatcccttctgccattaagcttgtcatcctggagcttggtctcaccacccaggaacctcctacaatgaaattcccacatttagagcgcctgagttaatggtatgattgtgtgtgcatgtcagtgtggggggggggtaccatgacaactaatgaatcttagaatcactttactggctccatcataaattatcctaaactttctttgttcatattcatattacaaagttagactatgctgcctggcgttggaatctgataaaaatctgattttatgtcagcaaccagcaatcttccccggtggtagattgtccaagctggcctttggtttcttgtgcagtccagactgagaagaaagtcttggcatttctgagactgtagggggttgtttcagcccatctgagcatggtgcacaaaggcggaagcaggctggtcctcaaaggactactctgagaaggagaaagcaaaggctatgggctaaatgtcagggtcagaggaatggctccagccctgcagaaaaaattatgtgtctctagcaacaaccgaaaggaaacaggaaaggaaagaaaaatccctgaacacactccagtctcagagtgggacagggctgagctccactgggcagttccaggtgggggggtgggaacatgatcctgttcctggaaaagttccaacaagacagcaggctatagccagccagctgccttgggcacaacacagagcttcctaaagacctcaggaggtaggaaaatcctagatgctgagagactcactcaggagggggctgagtggacagaggtggatttgaaatctgagaccctggtatcattccaaggcctctggccctcagcctcaagaggaacagagcttactcttccctgataatgtatggacaggaagctgctaatcccctgttcagtgagccacccttctgcccatgggctgaggcagcaactttgtctctagatcaccaggcagggctcccttagatgaagactgaccacagcctgaagccatggccccaattgcgtgggctctgaatgatgttgttcctcagacagatattttaggtagactgagacagcaacttagtgtatttaaaagaaaacaggcttgaaaacggagggggctccgttcaagtcctggctaaaccttgccaactctctgaccttagagaaccaactactatttctgcatgtggacgtcttcattggtagcatagagatgccctgatctctcctgaagggctgaggcagaaatgggaggccaggtatgcctgtatctcaggcacttcacagacagttgaaattaacacatgcaggctagttggctgaatggaacacaaaactcaggccgttttctctggtcttttgatccaaacactttcatatctgaaatacccaaaggaaatgaatattttgcaagcataggagcaataggggggtcaggagttgcctttgaatgctctggaaaagcaaaagcttcctttcctctctttgcttggctgaggagcccagatcaaaggtccccactctccccacagtgctgttctctggggacatcattaccatggacccagccatttgttggtttcagtgcggtggtgtttacacagaacgactttactggctatccctcctcttgtcccaggaaatgtcttttgttttatcaggcagagcaacaaaatcatatgatgaaataatcatcaggataattaacccctttcatcaagagagctaagaacacacatttaaggaccacatattaatagcaataatatttagaactggaaaaaatgattttattgctgcagaaagacctgaggagtaggttggcccctctaattgatgctgagtgtgaatctgcgagttgggcagcacacaaacgttaattagtttgtgctcgggcacacaccagctccagtacactcaagtttcatcccaaattgctgctaccatttcccactttcttcctggtagacattattacatttgtgatgattcaaatagattttctgcaggcattaaatttttagtaaacagacccaaattaacagctatttatgacattttactctagggatcaaatcaaaagcactcatttcatatataaatatctcttcttctctgcttttaatgaacgggtatttttgttgctgctgttgttgttgaaggcaaaattagacacatgcctcacccctccaggctgcctaatcatacgtgctccgtccctccaattgagagaacgttattacctttaggagtgaagacagaagcatgttaattttccataattcagtgaaacaaagcatagatctgaaatctccctctgtggaactcctttctcatctacagtaatgggctgccttttaatgaaaacaattcagcctgttctaatgtcaccatcagggcaacacggacttcactggatcctgatttgggaagacggtcttttcattattcttggtgttgtgcaggcaataaaggaactcgagtgtctatgagtgaccttgctggtggcaacgttgtgtttagtgctaatgaggatggcttcacggtgcaaggatgaaagggctggtggaggggttttggcagccgcgagcatccgtccgcttcccgcactgatgggaggtgctcacagcttatttactgcgtgcaaagatgaaatactgtcatacctgggcaaagctaactgtctgttggcatagagaccaaattttggactccagtaaattttgcagaatcacagatgacaggtcaaactgtgttttttcccctttaatggggagaaattacaagttttcattcacatttcacgaatggacaggcaaatgggcaaggtgtcattgataccatgttgattgagaaatgtcttctagatgaagatggcaaatttaacacactcacttagctctttctcttctcaaaccctcattacaattacgacagaaggatttttcaaaaggcctaagcccacatgacaaagggaacagatgaagacgacacaattttgaaaacgggaaagaaaaggctcagtgaaagtgacttagtacacagtatcttggtttggggcctcatcaaggtgaggcttcaagtacaactagcttattcaaaaggtgaagagaactcccacagggatgcgggaaagtgagacggggaaaggaagtcaccaggaatgggcgcatcttcaagccagttaccaccaggggcaacttgaacccgacctgctggggagagtctggaagccagggtagaacacctaccttccttcattagtagggtgcaagaaaattctgagggaacctttcagaaactaacagtacaaagaaatggagaatagcagaggaataagaagaaggagaaggaggagaggaagaggaagaggaagaagaagaaggaagaaggaagaagaaggaagaagaaggaagaaggagaagaagaaggtctgtccaggacttcacatatcgtcatggttaagcttcaaaaggagagactatccatgtggaagggaggggaaaatagcaaagaaataatttaagaacatttcccagtactgaggtcataagtttccaaattgagttttctcttaacccccacttttcccaccaactactacatttatttttactctgttttgcaacaaagattattatctgtgacctgtctctcattcttttctaaactgacatcaatgaggcatccagtcaccagtaactttcatattgctagaccagcagtcagttctcaggtgccgtgtggtttgctctcacagcagagcttgtatgtgctgtttgcatggcttcccaacctcgccccctcttgctcattttgtcttctccttcccgcctcactgattgctctttctcagcctcctgttctggcacctcctattctctttgagctttaattgttggagtgccccaatattggatgttctgcatgaggtccaaactcaccgtctccatggctctcattcagggcaagatcttgaagcccatccctattttaaggactctatgtctgcagattagaactttcctcctaatcccagactaatctatctagctgtacttgtcacattctctggatgtctgtcatctcagactcaaaatgtacaaaattagatgcctcaccatccccccaaattccacttcacccacagccttcctcatctcagcaatgctacgtctactccttttagttgctcaagccgaacattttgcaatcatcttaagctcctctttttcttttttctttccacctccaatataacaggaaatcccactggctctgccttcaggatgtatttagaatgtaaccagttctctccttcactgctgctgctgtactgagagcatccactttgtctctcgtcggcactgctacgggtcttcccaacaggccttcctgcttctaccctcacacaggctgtccttaactccggagtgacagtaagactgtaaagctgtgttaactcattgtcactactctgctaagaggcctgcttgggtccctctataactcggaagaaaagtcagagcaccccatccccactcctagaagctgataagggcctcatgatctctctgtctcatcatctaccactctccctagctgtcagtctacccctgccactctaattccctgatgtttcttcaacattgccaggaacctgcttacctcagagcctgctgcggactgagttgtcttctccaaaatccatttgtggaggccctcatccccagtgggagagtatttggagatgaagcatttggaggtgattaagcttagatgagctcagagtggagcctcaggatggcatcgatgccctggtaaagagggacactgagacctggccctcccttgctctccaccgtgtgaggacacaatgagatggtggccacctacaagccaggaactgaaccctacggggccttgacactggccgttccagcctccagaatggctaggaataaatgtctgctctttaagtcactgggcggtggagctttgttatggcagcaccaggggctggttgagagcctttgcatggctcttgttccacctggaatgagatttctaactcttggctacctcacccccttacctcattgtttcatgttgcaaccacccacccactccccatgtctctggcattctcatttattttttctttgatttcatagaacacatcacaaagccatttgctcatgcatgatgtttattgtctattttctatctccctgctagagggtaagatgctcaagaacactgctctgtctgcctccctggacccagaaaatgcttggcgtgtggtagaacttagatatatttgtgttgaataaattaattgaaggggtttgcagactattcagtacaatcgattataaaaacccgaaccagccccatcattgctaaactttaatgaggcaagtaggatatcatttttagtgggaaaaatcaggttcattcaaagtgttggggaatccagtgctatcaaacttctcaacagcaaccttgaaagctaggagatagataatgccttcaaatttctagaggaaaatatctctcacgtagcattttcttttctttctttctttcttttttttttttgatggagtctcgctctgtcacccaggctggagtgtagtggtgggatctcggctcactgcaagctctgcctcccaggttcaccccattctcctgcctcagcctccagagtagctgggaccacaggcacccaccactacgcatggctaattttttgtatttttagtagagatgggatttcaccatgttagccaggatggtctcgatctcctgacctcgtgatccgccctcctcggcctcccaaagtgctgggattacaggcgtgagccaccgcacctggcctcacatagcattttctactcagcccaactttcattcacataggagggaagaataaaggcattttcttacatgcagactctaagcagatattactcatttgccttttttggggacagtcctgtagcatgtgattcaacaaaacacatccataaaccaagtagctccaagaaacagtgactacacccaggaaggaaaggaagaggctgtccaggatggtgatgatgaacatccaagaaagcaattatcagacaaagggacatacattgacaggggcgtgtgcatcggcaggggagttgcaggatataccagtcctaagcacattaaaatctcaaaaaaaaaaaaaatatatttcaacaagatgattatccctgaagaaaacaaagttcattaaaggagatgtaattatagtgcattaaacgttctagccaagagcactatttacataatgatgatgatataaatatgtaatcatcatccaccacaactatgttggggaaaggtgaagccagtgtgagtgtgtgaatgcctgtgagagaatgtgagtgaatgtgtgtgtgctagtgtgtcaagtgtgtgccattgtgtatgagtgtgtgtgaatgtgtgtgagagtgtgtgtatgggagtgtgcatgtgatgagccacatccataagctgaatcatcttcaaaagatgagacctaaacctaacaattcaagtaacaggatgaaagtatgtgacttgaaaatatggagttaaatatcaaaaaaaggtccttgcatctgggaagcaagaatcaaaggtggatgagaaggggcacaaactgctgttttaaattttaagcactgtagcatccttgtttttaaacaaccatttacatgtatacgtgtgtgtgtgtgtgtgtgtgtgtgtgtgtgtgtgtgtgtgtatcttagacaaaattaagactttttttctgctttgtttccccccccccagcttttctcaagagatccacaatccggagggaagacccacaggcttcccagcattcacacagcatcattccctttgcctccagtccctcctgatagtgcatgaccccactggccgtccggatggataggcctgggactctgttattccaaacccacccaacctcacacatcctttccctacatctctgcatgtctcattctttcttgtctttcaaattcagggcacacctccgtctgctccctcatagaaaggccatctctctctctgtctcttaacctctctctctctctcaacctctctctctctttctctctctgtcttccttaaactgttattgtgcttgctccatgtcttctatggtctttgccattttctaattgcagttataaccatttgtggctgtgtcttattcactcctcgttaagttcttcaaagtcagtttgaaattctagaatatactacatggaggaacactattctattagtactttttaagacccactcttttttaatgtctcttttttaaaacttttattctcattataatatatccttatctctgttttgtttgggattattcttctgtacctcttataactacttaactgggcacttagatcattagtgtataggctccttatttccagattgtaggtttgaagcttaaatttttctctcaaaactgctttttctagattatgttaatatttggtgtagtatttttatcatttactttgaaatgttttaatttccctgatgagttcttattgacttgtagctattattaatacacatattttaaaatgtgtgaatattgttacaaacttaaaatattaatgtgctttgaaaaatgatcctcgtgatagcatctcactgcgatttcccagacctagcacatggcctaccttggtctatgccccacatgagtttgttttctctaataagtgggtacattgatctggtaaatgaatcacactttaattgcatttttatatatatatatttttattatactttaagttctagggtacattatttcaacagttgatactttctttatttggtttgttgacaatcgagagaagaatgttaaaaactcacactttgattatatatatattaatttctccctgtagttttgaaattttttgctctatcaattttaggtgtgttttattaagtgcaaatgagcttagaaatgtgatatcattatcataagtaataacttcaatcattttgtataaattgttatccttgacaattattttgactcaatatagacatactttctgcatttttgtagagctatctcctcttctttttggttcctattgcctgctgtgttttttcccatctgttttgttaatagttatctaaagctgcataacagatatcctaaaattatgtggctttagaacaacctaccccttgttgtcctacagtttctttgggttaggaatctgggagtggcttagttgggtacctctggttagcagtgtcttacgaggctgaactgaaagtagtggatgtggctgtggtctcatctgaaggcatgactgaaggaggacttggttccaaactcactcacctggttgctgaaagaactcagcatcttacaagctgctcactagggacttctctcagatcattgacccatgggattcttttcagaacagcttataaaatggcatctggcttcaatcagatgaacactgaggaagcagagagtgagcaagctgggaacctaatctcagaagcagcatccctccaactttgctgtattctgtgcactaaaatcaagtctctaggaccagcccacaaacaaggagaggagagtgtgaagattgtggggaccattggaagtcccctgagatgttgcctacacacagtctcttcactctcaaactttccatctctgtatatttttggcaggtctcttatattcatatccaaactatgacatctgtctgttaaccttttctttttttttttttgagatagggtctcactctgccaccaaggctagagcacagtagtgcaatcatgagtcactgcagcctccacctcctgctcaagcaattctcccacctcagtctcacaaaatattgggattacaggcatgagccactgtgcccagcctctattaacttttgagttttatgatttttcatttattttcattactgaaaactttgaatttttaccttattctatatacaaatatataaaataatatttataaataacacac

SEQ ID NO: 740 - DNA, 2585 bp, Homo Sapiens
agctgacacagatggtgggaggtgctcgtgcctctcacggtgatcagaaacatcaccgttgcaggtgacgccacttcacttaacactgggtgtgggcggattcatccgctctgaaaattacgtctttggtggacatcagcgtggacttgggttgtcttttcactttcttgctaatgtccttggatgatccacaacttttccaaagcaggccaagctataaataaagggtggactgaccttgtcaactgttaaattggagccgtggtgcgttgcctagaacattgcggatgaccccgagcagcacagcagatcaacggctgagaaagagctcattcagctcatctaactaggatgctgtcctgccagagccctgggggttctcgtctcctggggcaaaagcagcatgcaacccttatgaacccatcttggaaggcattcggggagcccaagacaagaccattgggagcctcagggtcacttgtgggggtctctgtgctggacggctgtacctctcatgaaatggacaactgaccataagaaggaggttagcctttgtggcttgggcatccagcctttcagagatatgaaaccacacacgtcttcagagtgaacagctgctcaccccgatgtgctcaaggggtgcaggatgtggacacatcctactgaatgagccagacaacgtaactggatctgtccagaacaccacgatgggtgacattgccatctgcagcagtgctgtacttcctcccgccaatttgtaaagtgcagacaggatgctggatcaactggctgctgctgaggccagtgacctctagggcgtattcccacgttcctttgcagtagctgctcacctttgtaagcatgtgagttattcgtgctgtctgttgtgatcctaaggaatccaatggtcaggaccagaacttctgaagtacagcccagcattgccgtctggcatccccagaaagcagattttgagattggcatgatggccgttaagcagggcgttctctctggagcaatgtctagccggggtcggagtggggagagagagaggggggctgctgagaatatcacagagagatggcagcctttctgcagcataggcctaagtgcacactcacctggctatcactgagaggactctctgttcaacagggccactcagggcttcccctgcatggagatctgagtgtccagggaggggacgtggtgagcatttctctggtcaaagtgtgcaaagcaaaatctgccccattcctgccaaagtggttgacatggaggaaaggggagtgccagttctgtaggctgaggtggtggctgttagaactgctcctaggctagttggtgttctggaaggttcccctctatgtgagatgaaagagcatatctttaagagctgcaactttgaagctctaatatagaatgcttttggtggcaagcattacttcggaaagggcttgaagacccctgaagatccttggtggcctaggcagttcctttattgccagggctgtgcaggactaagcttcaacagcgccaccatgtgacaagaagcaattgcagtggtgcattgagggttttcttttgcactgagaactcaagtcccactttcacccttggacctggtaaatctttggggttcatggacaattctgaggaggagatacttaagagagtgatgttagaatttgatgttttggtttattgtatcagaaaataaaagaaattggatttatagctcagtttgtggttcatatcaatttaaatagctttgaaatgctgataggaccatcacggttttttggttgctgaaatcccataactaaagcaatgcctcaataagcttttaatccacagcccccatgcccaggtctataacaaagtttttatatgcctatggggaaaaacaattatgaggcaaacatttataaagttaaatttattacgtttctactcctattttttattctgctggtgtattgttatatattttcctacatatttaaacattttcttcctcttataaaatgttagtgattttaaatgatggtgtgtccggaattggttccttctggtgggttcagtcttgctgacttcaagaatgaagccacagatgctcacagtgagtgttacagctcttaaagatggtgtgtccaaagtttgttccctcagatgttcagatgtctccagagtttcttccttctggtgggttcgtggtcttgctgacttcaggagtgaagccgcagacctttgcagtgagtgttacagctcttaaaggtggtgcgtccagagttgtttcttcctcccagtgggattatggtctcgtgcagaccttgcattgagtgttacagctcttaaagggggcacggacctgaccatcctggctaaaatacagtgaaaccccatctccactaaaattacaaatattagcccggagtggtggcaggtgcccatagtcccagctactccggaggctgagacaggagaatagtgtgaacccgggacgcggagcttgtagtgaacagagattgcgtcactgcactccagcctgggcgacagagcgagactccatctcaaaaaacaag

SEQ ID NO: 741 - DNA, 2028 bp, Homo Sapiens
cactcaggaggctgagacaggaggatcgcttgagcctgggagttcaaggttatagtgagctatgatggcaccactgtactccagcctgggcaacagagcaagaccctgtctcaggaaaaaaaaaaaagcagactgtaggccagatatgagaatggacggtttctcaatttttacctctactgagcactgaatgaatgaatagagagtaggacgatgggactgttaatattttcagcatttccctctcattcttttcctctgggagatagtacatacaatggttaagacacaggctatagaatagactgacttgggttcaaattcagctccatgactgactttggagtgtgacctctctgaacctcagtatcttcagctataagacaggagtaattgctacctcactaggccaggtgtggtggctcacacctataatcccagtacttggggaggccgaggcagatggactgcttgagcccaagagttcaaaacaagcctgggcaacaaggcaaaaccctgtccctacaaaaaatacaaaaaaaaattatccaggcatggtggagtgtgactgtagtcccagctacttggggagctgaggtgagaggatcacttgggcctggaaagtcaaggctgcagtgagccctgttcaccattgcactccacccaaaaaaaaagaacaaccttgctgttatgcggattagacaagagacaccatatgatactgggcatatggcaatgctcagtgaatattggacagctaatacaatttgcagagtcactgaggaaaagtatagcttcagagagcttctgtgtccagatttcaacgattttctttcatcattatttcgtggggctcccaggaccatatgtggctcacaaaccacaggctaggatgtgtttaacgttaaaagcaagcagtgtgtttctctgaagtgtggctccaccatggtgttcggttacacccagaggaggaggctggtgggcagtcatagaagtgcatcttccagagcaggaagggatcaacagctcttcctggagacttccattctcctaccccagtttctgagcacagcatgaatctagaggagtttctcttctgcttttcctcctagttttgtttcctctatcccttttccttgctaaagtgtgttggatggtcaggaatgtgggcggagaagagggggagctggagacatctcatcctttcatccagcttgtgtaaaaatgcctcagaactccctcataccacatgcaccataaattataaggtcaagctttgtaagcctgcagccctcttggctttttgcatgttggttagaatgcctaaatagaaagcctctgttaatgttgattgcctcttgtctgttccaggttggcaaggcccccagtggccaaggcatgagcctggatgccctgcaaattgagtacgtgttagggatgggggccattctttatagtttgactctggagagctaggaccacctttcccagcctcaggggtgcacatcctcaggagctgcctacctccagatattgtaagtccatgcagaagaggaagggcccagctggggcacctcttggttgaggaatgagtatgtgacattttcatgtgggcacattttgatactactttaaaaatagaccaagcacagtggctcacacctgtaattccagcacttcgggacgctgagagaggtggatcacctgaggtcaggagttcgagatcagcctggccaacatggagaaaccccgcctctactaaaaatacaaaacattagctgggtgtggtggcacacacctgtaattccagctactcgggaggcagaagcaggagaatcgcttgaatccaggaggcggaggttgcagtaagccgagatcacgccactacactccagcttacactggacatgatgaggaggaggaggatgatggtggtgattatgatagaaatggtgatggtgatgatgacaatggtgatagtagggatggtcttgctctgtcgcaatcaataaatgaatgcataaacac

SEQ ID NO: 742 - DNA, 1571 bp, Homo Sapiens
aaaggaaactgaagaaggtcaatctagaatgatacttgctggatggattgaaaaagtgaagctttagcagcaagtagaaaaactgaagcatcagttgcagtaactcatccattgagtgaaaaggttcttcccatgtccctactctcagaaatgcattctgaaatttcgaagaaacaagacattacacaagtacatggcttcactaccaaggggaagggcaaaagaccatctttgatttaattccaggcttcagtgtctaattctgtggcaaagatagctcatgaattctttgttcctctgccaagcgcaacagggataagtagccttgctctgggaatatgagtttgatgattgggttgcatgaaccctggaagcctggaatattcatctattttcacattcttctgtccctcctgactgcagcactccccaaacctacatggaagagctaaaatcaattctggtaaatctcatcaacttctaggacactgtggtagatttccttcagtttaatctctagcattaactggaagaaacattttcttactcagtcactacatttgtcaagaaataatgctatggttgaacactgcacgaaatgatagagattaacagtagcacaatactagacatttcttttttgctattctacttaatgcctgatgtaacctcatgaggtggatgttgtactcctgactttagagataagaaaactgaacttttgggaggctaaataacttacttacagttacatagtcaagaaatggagatggcaagagttcaggcctaggtttgtctgattgcaaatactacatcctttctattgcttcactttgtttggctttaaagctgttaaatgagaatgaccataataccccagagaacttctgtgaggattaaatggatatgcaaaagctctcgacataatacctggctcaagacatctggggaggcattcaactgggacctgcaggattcgctttcaatgtggctcacccacatggccaggagtgcagaccaggaccagctgtttctctccacatgggtttcttcaaggacttcttgggcttcttcagagcatgccagctggatttcgtgagtaagcatcttaagagacaaaaaatggaggctgccagtttaataaagcctgtgccagaaactggtacagcatcacttcctccatactctttcagtcaagcagtcatagggcccagattcaaggagaaacgcataatccctaccttttgatagaaacaattttcacttgaaaactttgggggtatgttttaaaagtattacatctcccaaacctcctggcagtcaatgccagagccaggatttaactgcaggtttatttgatgacaaagcccattttacaaagactaaaacagacctgaagagaaatatagcaggtttaagtaatttcccatggggaaatgaaaactctgaatccaaagtccttaaattagctactacactatggttcacaagatgaaatgcactggtgcatggcagtgcatttttaaattgtgatgctttctatcaataaactctttgtaagtaaaagtaaa

SEQ ID NO: 743 - DNA, 11863 bp, Homo Sapiens
cactgggttagaggacatggggcagaagacctgagaaggaagagaggacagttctgtgccacactggtcatatttagaagacattttcatattccaaccattgttctgtgtgtgcattttatttctcacgactgtatatgtagttaacaatactattttttagggaggtgggggggtcagccccccgcctggccagccgccccgtccgggagggaggtgggggggtcagccccccgcccggccagccgccccgtctgggaggtgaggggcgcctctgcccggccgcccctactgggaagtgaggagcccctctgccaggccagccgccccgtccgggagggaggtgggggggtcagccccccgcccggccagccgccctgtccgggagggaggtgggggggtcagccctccgcccggccagccgccccgtctgggaggtgaggggcgcctctgcccggccgcccctactgggaagtgaggagcccctctgcccggccagccgccccgtccgggagggaggtgggggggtcggccccccgcccgaccagccgccccatccgggagggaggtgggggggtcagccccccgcccggccagccgccctgtccgggagggaggtgggggtgtcagccccacgcccggccagccgcctcgtccgggagggaggtgggggggtcagccccccgcccggccagccgccccgtccgggagggaggtggggggggtcagcccccctgcccggccagtggccccgtccgggaggtgaggggcgcctctgcccggctgcccctactgggaagtgaggagcccctctgcccggccagccgcccgtccgggagggagagtggggggtcagcccccccccgcccggccagccgccctgtccgggaggtgaggggcgcctctgcccagccaccacccggtctgggaggtgtgcccaacagctcattgagaacgggccaggatgacaatggcggccttgtggaatagaaaggcgggaaaggcggggaaaagattgagaaatcggatggttgccgtgtctgtgtagaaagaagtagacatgggagacttttcattttgttctgcactaagaaaaattcctctgtcttgggatcctgttgatctgtgaccttacccccaaccctgtgctctctgaaacatgtgctgtgtccactcagggttaaatggattaagggcggtgcaagatgtgctttgttaaacagatgcttgaaggcagcatgctcgttaagagtcatcgccaatccctaatctcaagtaatcagggacacaaacactgcggaaggccgcagggtcctctgcctaggaaaaccagagacctttgttcacttgtttatctgctgaccttccctccactattgtcccatgaccctgccaaatccccctctgtgagaaacacccaagaattatcaataaaaaaataaattaaaaaaaaaaaaaaaaaacaatactattttttgaactatctaccctttctagatgttctgaaatgcctatgttaaaattagagatagtaaaataacacattttgtaaatctttttgttaaaattcatatgtaatgttgttttggttggggggggtggccaaaccacctgttaataatacacattgtgtttgtgcactggttcaggggaggagagaggaaaggaagtgtaagagctctatgccaatgtgcttatagtgaggcaaggttaaccattgtctcatgcctgggcattttgttttacttatctgggtatattgtggatctaaaggacaaatgagtcctgactttacatctagtctttctagatgttaaagaggttgctagtgtatgacaaaagtagttagtaaactaatatattttgtacatttcgttttaagattcccaggaaagacagtcttctgaaaatttgagcattattgcccagtgggttgatggagatgggaaggtgtaggccagaatgttcatacttggaagactcagtcataactgtttttacatgtgttcactttattcaagacttctgtgcatatagtggacgaattaacttcttacctgaaacatcttatctatgtagatgttcagaattgcctgatgtatgttaagtgtagaggtagtaaaatatcaccttgtaaatatctttttgctaaaattcttgggaagtactgtcttttggaagtggaattgtgaagccacctctgtaagcagtatagtactgtctatacttgttcaatggtttagaaatgggagggaagaaattgccaaaggtaatatgctagtgtgttcatacttggacatttcacttgccatttttctgtctgttttgtgcattttgttttgctgtgtatgtagagtacataatggacaaatgagtcctaattttgcaacatttggtctctagatgtttaagaagttgccagtgtatgacaaagtatctagtaaaattagcacattttgcacactttgtattgaaattcataggaaagcttgtcttctgtaaatgatttttgggtatgaatttgttcagccatctctaagcgttacacatgcctgtacctgtccactggattgaagacagagagaagggagtgaggaaggactggttcaaggtcaaaattgtcatatttagaagatacctccgattatagccactgatacatgtgcaattttattttacagtgctatgtacacagtggaaagttatatgaaatatctggtctctctagatagttagaaatgcttgatgtatttaaaagtagaaatagtataataacactttttgtaaatagcttttaaaaactgatgggaaatactgtgtttgcaagtgggattgttaaatcacctctgtgaacagtgttacttgttcattcagttgaggaaggtgagagggaagaaattacaaaagatgttttgctattgtgtactagaaaatttcagtttatccattgccttatatgttaaatgcattgcaagtaactttgctatactacatattgtgttatatactggaaaaatgagtcctaattttaaaatatccactctctagatactaaagaggttgccaatgtatgacaaaaatagtaaagtaacacattttgtacactttgtgttaacgtttataaaaagactatcttctgaaaacgacttttggaagtgaaatgataacatcaaccctaagtgacacatgggcccatatccaccaggttggtggtgcagaggagctggaagaaatgaaggattctagatcagaatattcctatttagaagacagtttaagataaaccatgtgtgtagtttattcaaccctactgatgcaagagaatagggtctggaggcaggaaacataaagcagattcatgcagacttcctagaaataaatgaaatggaaacacatcagctatgacaggacatatactctccaacagagtaaatgactttgtaactttatttcatcctctccatttacatagggcgtacatcaagtaaatgactagggtgtatactaagtaaatgactttgtaactttatttcatcctcttcatttacataaggcatataccaagtaaccaatggaaaccttgagagggtatttaaacccgagaaaattctgtaactgggctcttgagcccctaagcacaggccttctcccaccctgtggagcgtactttcatttcataaatctctgcttttgttgtttcattctttccttgctttgtgtgttttgtccaattcttggttcaatatgcccagaacctggacaccctccactggtaacatattttggcaaggcagccaggaggtaagcccaaagtttgggatttttcatcttttcttttccactccatacaggggaatctctccctctgtctctttttcctttccaactcgggacccttggtgggcagcgcctaaacacggaggcaaccgcaggtttctgggtggggccatcctgaaggacttttttctatcttttctggttgtggtccctgattcctatgtgtggcgcagctcagggcaaacttgcagctcagggtgaacttgcatgtgtttcaggcgacggaaaccctacttgactggctaaggacaaaagaagcctactcagcttccatttcctatcattacagttcatggctatcatgctagtggaacaggaagcatgggataatgtggccttatcaaattataaggatgctaaacgccagtgattacacccaggaaccaaaggacagctcacaattgcctctggagggaaaatatgcaaagcggcactggtgcccacgtaaggtcagagatgcctgacactcttaagactggaccccaaagggggattccccaggggatcctccagacttcaacctctccaaaggggatgcccttggcagcagttctaaggactagtactaagccctccttagaattttctcttgcagttgcaatactgtttggccccaatatggtttggattctggcatttgctgttgaatgggaaagcgggatgcagttgcatgtatccaggctttggtgctgctgttctaagcaggggcaggcctagttattatgtgatgttctcctttggtgctgtttgaccccagtgttctttcgagtctggggaggtttggcctttaaaaatcaaactgccatggaaattgctttacctgaaataatagttcacagccttcattggattgcttattgggtacacaaagtaaaattggcaagcttgtattgctatctcatggttagggttccaaggtaaaagctattgaatcttcatttgtgtgtgtgtatacacatgtctagatgtgtttatttgcacatttgttatatgttgtgttttggcatataagtaaaagagcactcataaattaagtaaataagtcgaagcaattttcaagttcacatgacttaagtataactttcctaaacaggctagttttaaaattattggtgaagtaaaaatagaaatgccttcagaattgtcagcatatatttttgtctgggttttatatttgtctctgctagatattttgaggtgttagggtttggcatagaaggttataaaactataaacccagccaaaacaaaacgatctcgtttgcgtttttttttttttttttttttttttttttgacaaatgagcataatttaatgttagctaaatcttctgggttactggcaaaaatacgtatgtattaactttgaggctcttacttaggtttaagtgcacacctggctattcaaaatgtggttaacagggaaataactgactttaaaagatagtgtctaacatttcggtttacagaggtaatctagataaactgttaaaagtgaaacaattgagtacagtgaatgggacaaatgttttagataagctttttgtgtaaagtcttaaaatcatttttgatgctcatttaagatctgggccatttccaattagaaaggttgtgatatggggaaatatgtttctaaaattgtggaattgttcttaactataaattcccatatctgatagttcaggatttctagctttttagcgtttcactaaagttttaggttactaaggataagaattctagttaacacataattctgtatacaaaacatgccagaaagtttgtgttattagtgagaaaaagaataatttagaagttatctaaaagttagttcaaattacagatttgaaaaggttacttatgaaacaatgtagtaaggaaccagtaagtagaggagaacgatatggaaaaagtttagataataaaatattctttaaaacctgatagagaattggagatatttggctaattaacattttcatagtgaaagctgttagtcttgataaaagtaaaataagcattgtaaagaaatgcatcggcagtttggcaattcctttttactatagttaagcatgaagccggatttggtgtggagccaaatttcacatacatgcttgcattgcttcacactgtttactgttttgtgtggatagtgctggcactggagtacttattggttatgtgcctatagtgtatttcttgattgcacaggatgtatggtgatattggtgaacttaaggatactgaattgtgtatcaggaacaaaatattcattatgtgggttttggggggccctaggtaaacactgtagcctccagggtagattgagaaggaaaaatttagggttgggttcctatttgtttttgcttctaattttcatttgtttgccatttattctcctctggctttgcttgtgtatgcacatataaaatcatatatattttttttaaatttctagtggaaggcttttatttggttctgtgaatagttattttgttccctatgcatttctagcaagtcatcatttgttccatttatctggaattcctaggctacctttgtcaggctggcaggaattgatggagcacaccagctttttaaccttgaactaactcaaattctgtttatgatactttaagtgtgttgagtatattttcataaacagaatttgagtcatatttctctgtctgcccattttctccaaaattcgtaaactatttgtgaatattcttaattcatggcaatgtgtttgtttgcatatagtcaagcagggttcctagggctgctttgggagacagaacccagaaacctggcatactggcaaaagggtaagaatttcttaccagccagactctggtctctgtctctctgtgcaaactgcataaatgaatagtaaaagtcactgtttatctcctctgtaaagttttgattaatataaaaaaagaattctgaggccgatcttaagctgtagtgaatctggtgtgctttgtgtctttctgtattgttttgtcataaagaggggtaccttagaataaaatgtgtgcttaggaccccatagacctgctgttcaagacacaccagcagactggtcagtcatgtctttgggagcttgaccttgtaaccatgtggccatgctttctcttttcacagtggcagcctgggtttagggttcaattcctggcttagggaatgagtcctttatcttctgtctgtgtatttatatgtgttgtgtgtgtactataaaagagcattaattaattagcttaataataataagagcttaaatcaaatattttatcagaaaagtaaaaaatgtaatgccttctatttacttcatgtaacttaagtaatctttgggaaataaagacagttttaaagattattggtaaaataaaaatatcttcaaaatgtaaatatttagtctaaattatgcaggtcagatattagatttgcaaaatgctttaaggtcataaaccgcttctttgacttttaaaaattgctcaatttattttggagcattagattctagataaggcctggggacaaatagaattagccatgtcccctagctatgcaaagaaggttataaagaaaggagattttatataagaaaggatcttatatcgtaaattcgtgtcctaaagtaaaataagcggttgttaaaaaagagggatgtttaggacaagttagaaagtcaaagcatgtcgtagatggtctgtgtaagtcatgaaataatttacaaaagagaatttatgcaagaaatatacaatttaacggtgattagacctcctaaatgcttcataaaatgccactatgactcttaactctacaacttgcctgctttacagctcggtaaggcctgagacacgtggagtcagatgctggagtcagaccttaagtgtacttctctctgggtcctagactccacaactaatatataattaaaatccttaacttaccaaagttttcaccaaaagtaaaactcgctaagagttaacattgtaacatgtaagtgagactactgaagcaacagttttacatgcaagttacgtaagaaaagtgaatgcattttcagtgaaagattataacaaggcatgggaatgtagatttttttttctgtctaaagggttaaaggattgttttaagttaggataaagctaaaagtttgaatgagttgtggaagatttataaaaattaatattgtaaaaaattatgtgtgtgaacatattgactaaatttaaaggggtattttctggtttttccataaattgaacatcaaaataaaagcacaaacagggttttcttaaagcaccgatctgctctttaacaaacatttgtaaaggattataaaaggtttatgagaatctcaccttatggtcaaacggattaagattggaaagatatgtctacaaggttttcttaaaaattggggttgacattaatagcacactaatgcaagggtgaaatttggctttctctcttgaacaagattttcatgcagtattaaaagataatgaaagatctttgtttgccttttgaataaactacccccccaccaaaaaaaaggaagggaaagacaagagacagattgtttgtaaagtaagtcttccatctatcaacatggaaaggtttttgccttttaaaacatttttgagtcatcattttgctaaatgaatgactatggtaacctggaattccatttcataatgtcaagtgttttaaatctttaacatatttaataggcttcccaaaatcaaatttcagcttcaaaattgtcttttctaacctctaactttgagatgctgcagagggcccctgaagcatccaaaagagaggtaaacagaattatttgacatgtttaattacatgggaagcattgtcaaaaagaaaaaaatttaatcttcttcaggttatattttagtgaataatattaatatatgttccaaaattgtatgagatttctaaaattccaatatgtctgagtatatgctatcaatcataattatgattattatgttattgtagaccacagaaataaccaaatttccttgtcaattgtgtttttaactataactatttaaagtcatttccacagttaattgcttaatgctgatgcagtttctgaaaacttcacaagcatgcaaagtcctagaatatggtgtcttttaggagattcatgaaagattggaaaggaccctaaaaagcactcttgaatacaggtttctaataagtttagaattatatcatttgaactgggtaagaattcctggaactttaatgaaaagactgactgagttctaaaactgctaacccaagtagaacaaaaattaattaaataccaagaaaatactttgccagattttcatgctaaatcagctgatactgaaactgtttagatataaaatttgaataaactccatcatttaaatcaaattacctatgataacccatcagttatcagtgttatgcacctaatttggggaaacaactggtattcaagaggatatgagtctaatgttaattaagcatgaactcatggagaaccaggatggccaccttgtccttcctaagtcgttaaagcttttgttagtaaaatttctgcattacatgactcgtcacggaaaagataaaatgatccaaattgaatatattgatgtggtgacttataaattgctaaaatagtttataaccaatgtttggtcccatattcctgggaaaacaatcaaagcttcaggtacatccagtcacctgataggccatttaaacattttatagagggattttattcaattgttattttcagtgcatgttttctggttgtataaaagctttcccatgcaagagggctgatgttataacactaagttattatgccaccaagtattttcacaaggtaaagaaagctttttatggttcactgaggacaatcaactccttcacaacctagaaactgaagattgtatcttctgaaaacattggataaagactgtccttgccatccacactacagcaaaacttctggactttgaactttgggttcatgatctcacaactgagaagagtccctccacactcttggaactgtacacccattggaacccttaaggtaaagctaaccagggaagtttctctcccgaagaagatggcatccttgatgtgaacagcttttcccaagatcatgaatcaagacttctctattatcatgagactcttatctttgaatattttttccttgcttttgcctctatgaagaatagaagtggaaaaaggatctgttgtgtacaattatgggttatacttttatttgtgaagaattttgcagccagctttaggtcctttttccatgatttggaataaaagaggcaaatgtatccctcataataggctccatagcagtttactgtaaaggctatggttacataatagactaaattatcttaagaaagttatgctaaataatagagttggctaaacagaagagtatctgtgcagctgctggcactcatggcctatggagaaaacatcaggtattatagagattcagttgtagcaaattaatgaagagactgcttagttaagtgagtagactctttagctcattgtttaatctatttgagtttaggaggtttggtttatggtgaccctggataaggagcatacttactctcaactcttggtattatcctcctgatagtcataataatagtctccctggtgtgctgtattctctcaacggttttaaatgtttgcatgctgccacctctagaatgtcaaatggcctctcttcaactggaatgacaagagctgaaagaaattgcagccatgaggacactgtaacctacgaatgatgtgctgagtccaaaagcccaaagtgttggtaactgagagtggtgctaagtaaggccctaagttttggtcacactctcacttaagtgagaacctgaccaaaaaagtggaatttttttttttttttttttttttgagatggagtctcactctgtcacccgggctggagtgcagtggcacgatctcggctcactgcaagctccacttcccgggttcacgccatttttctgtctcagcctcccgagtagctgggactacaggcacctgccaccacgcccggctaatttttttgtatttttagtggagacggggtttcaccatgttagccaggatggtctcgatctcctaacctcatgatctgcccacctcggcctcccaaagtgctgggataacaggcgtgagccactgcacctggccaaaaaggggaattttttttaaacaaaattatgggaggtcatttttttgtactgagcccatgcgccaggccccaacagaccaaactaaaccaaaacggagtcacgtatgccaagaccttaaggaaacacatagatcctagaacagaccacaggccaggttttgtttttctcctacaaatctctataacaaacattcctgacagcatagatatccaccccctgagttcccattaaatcttttaaccaaattaatttcctctcgccaaaagaccatcaagcttcagatgatcatgcaacaaaagtttcatccagttccaccacccctggccatcaaggagctaccctgccttcactagaaagagcagagcaggacttctgtgatcctcaataggtagggactaggcctcaagccaacatgaagcagttacaaaagaaagaccatcggcccctccacctcccataaagatttatggggatcccatctctggagggaaatgaggcagaagaatagggtctgtaggcaaggaatataaggcagatgcatgctcacttcctagaactaaatcaaatggaaacacttcagctatgatgggaaatgtcttctgtatttacatagggcatacactgagtaaccaatggaaacctctagagggtatttaaaccccagaaaattctgtaaccgggctattgagcccctatgctcaagccctctgccaccctgtggagtgtacttttgttttcaataaacctctgcttttgttgcttc

SEQ ID NO: 744 - DNA, 3893 bp, Homo Sapiens
cttggaagcagtgggaccgtctggtggtagatgcttcacttcttcatttatgactccacattcgtggaagagagcaaagaacaaacctatttctgaaatgtttctggcttccatatgcctctggcttttaggaaagcacaagtggcctgcttggggtccctcctggcttgctggacttcccgtcactttttgcctgtcgtcttccatggttcctgcatggatcttgttgcctcaggaccaagctgcctttgcttttccacaatgtccatgactatgtggggaaggaaatggaccctcatgctgacagcgcatgtccacgttactagtttcctttagaaaaccatctccaatgggccaggcacggtggctcatgactgtaatcccagcactttgggaggccaaggctggcagatcacaaggtcatgaaatcgagaccagcctgaccaacatggtgaaaccccatctctactaataatacaagaattagctgggcatggtggcacgcacctgtaatcccagctactcaggaggctgaggcaggagaattgcttgaacccgggaggtggaggttgcagtgagccgagattgcgccactgcactccagcctggttagggagcgagactggtctcagaaaaaaaaaaaaaaaagaaagaaaaccatctccaaccttaactccaggggcgccattcataccctgttctatagaacctgcccaaggtgtgctcctgaagaaagggaaggtgctgacctaatggctccgagaacagtatttttgataaagtgcagtctctcagcaagtgtcctcaaagtgctggccttgctcatgcagtagagctgggaaagcttatttgggacttgggtaccacataagaaataaagagggaatgtcatactagcaggacttttgacaaaaaaagcctggtatgagaggccctgacactaatatgattcctattctcactcaagttaatagatcatttaaccaatagcaaaaagaaccggaagtgtcctcccaaagagtacactatggaaagggtggggggatggagtacctttacagtggagaaaagtacccttacaccacctctgcaggggatctaggtcaacatcagcagttacaagttacattgacagcatgtggccttgatatgatgtgatgagaatggctcttcacccctgtggtcttcctccacaaaacccatagccccagttaaatcatgaaaaaagcatcagacagaccccaattgtgaccagcactcctcaaaattatcagggtcctcaaaaaaaggaaagtctgagaaactgtcacagtcaagaggagcctcaggagacaatgaaaactaagtgtcatgtggaagtttgaacagaatcctggaacagaaaatggacatcaggtaaaaactaagaaaatctagatagtgtggacttcagtgaataacaatgtgttgatattgattcattaattgtgacaaatccactacgctaattgccttagtctgttcaggctgcaataacaaaataccatggactgagtggcttatacacaacagaaatttatttctcacagttctggatgctgggaagtctaagaccaaggcactgccagatttggtgtctggtgaaggtccatctcctggtccaaacatggctccttctcactgtgtcttcccatggtggaagggacaagaatttctaattccactcatgagtgctctgatcccaagacctaatcacctaccaaagcccccaccttctgatagcattaccttggggcttaggatttgaacatatgaactggggaggactctggggaaacacatttaaaccacagcactaatgtaggatgttaataataaaggaaactgggtgtggggtttatggaaactctcttaacttggtatgaggtatatgcaaactctctttaatatcttcagaattttcctgtaaactttaactttaatctgaacttctaaaaattatagttatacacgcatacacagagagagagagagagagagcgagagagagagagagagagagagagaagttatacatagccttcgtgttgcaggtctagcctacacttctagccttattccccctgtttaaaccttataagtcagccaatataatgaaatttccttaaggtcaagatgctactatgtttattctccaaaaaatttgaaaaataaatgagttttcttaatttcttagaagactcaataaagttgagatcataaagtgtaagttaaggaagaattctacctgaagagactcatgaaacaaaaatgatggtgaggaaagggagtgctgtttcattgactagaaaagaattagcaaattaatcagcacattgccttttaaatgttccacttcaagagatgcacacattttcaggcccaatggtatcgtcacttccaataaagctttattggtggtatctggagaacgctatcctattatatccttggctaagctcacatatgagagactctttaaaggaacaatgcaatagtcttgatattcattgcagacactggttcttgcctactcaataattattccctcaccttcctgacaaagaacccgacttgttcaggtatctcacaatgtgctcaggaaaggtgggctcttccccaggtccatgtggttaaccagaactgctctaaaacatcgtgagaatcccattcacctttgccagtgattggtttaagggtagggagattacccaattctgaacaatgatataggagaagaaagaaatttactaggggattgatgggaacaggttattttgttcactatacagggacacatagtgagaggtgacaatgtgctagcagccctcactcactctcagcacctcctcaagtgtgggcgtgtggcgtgggactggcaggcagctctgcccatggccccgatgtgggatccactaggcgaagccagctgggctcctgagtcaggtggggacttggagaacttttatgtctagctaaaggtttgtaaatgcaccaattagcactttgtgtctagctcaaggtttgtaaatgcaccaatcagcaccctgtgtctagctcaaggtttgtaaatgcaccaatcagtgctctgtgtctagctaatctagtggggacttggagaacttttacatctagctagaggattgtaaatacaccaatcagcactctgtgtctagttcagggattgtaaatgcaccaatcagcaccctgtcaaaacagaccaatcagctctctgtaaaacggaccaatcagttctctgtaaaatgggccaatcagcaggatgtgggtggggtcagataaaggaataaaagcaggctgcccaagccagcagtggcaacccgctggggtgcccttccacactgtagaagctctgttctttcgctctttgcaataaatcttgctgctgctaactctttgggtccacactgcctttatgagctgtaacactcaccgcgaaggtctgcaacttcactcctgaagccagcgagaccacgaacccaccagaaggaagaaactcagaacacatctgaacatcagaaggaacaagcgctggacccaccacctttaagaactgtaacactccccacgagagtccacagcttcattcttgaagtcagtgagaccaagaacccaccaattccggacgctttttggcgacccagatgggactatcgcctatcaccaagtcgtgagaccattgcctatcactgagtggtgagactgtcacctatcgccaagcagtgagtaccatcagaccccttttgcttgctattctgtcgtatttttccttagaatttgggggctaaataccgggcacctgtcggccagttaaaagcgactagcatggccgctggactaaagaaacgggtgtcaag

SEQ ID NO: 745 - DNA, 1999 bp, Homo Sapiens
ccaggcatggtggcacgtgcctgtagtcccagctacccaggaggctgaggcaggaggatggcttgaacccgggaggcggaggttggagtgagccgagattgcacgactgcactccagcctgggcgacagagcgagcctccatctcaaaaaaaataacaattaaaagaatgaaaaaataaaataaaataaataaagggggaactaaagatacaaggggataaggaaagatggaagctgctgctttatggagacaaggtggagggacatcaccatgagaagctatagaggataagcagttgaagctttgcacaaaatgtagatgacaaagatgggtagctctggatggttattttctgcttgtttgttttgcacctgcttaaaaaaaaacacctgatttttttttttctgtattgccaccttccttctttcattaagaagctgctgttatggctccaaataggaccttgtgccatgaagtgcaatctgcactaacacatctacaaatgcatgtcaatcacacctaaagtagaaaaagaaagctcttgtggaattattctaaagtctaatggatttttcttccccactcttaaggggcatctcagcaacaagttgttatggaactgtggcaacatcttaatattcccattctcaaaatagttcagaaaaagtgcatgaaaattgggggaactacttagtaagcacttcaggatagagaatgtagctaaaatgagtaaagtggagaaggagtcaacggcattgtgcacagcattgtattcatagcttgctcccttaaatcgtgtttgggacttggctgctattttggtacagctgctattactcagtgcagaacattaacatatgggggaaattgtatattacacaatgcagcttccacattatgctgacaccattcctctacttgtccatttactttaagagacacttactgatgcaaaggagactgaacagtgaaggatctcactcagaatcctgtccacaatctgtccagtttacaccttaccccaaagaggtaatctcttttgttaattacctgtgtatcttccaattttttcatgataatataataatgactcttcattccctctttttttgacacagaggtagcctgttatacaacgttcttcacctcattctctcacttcacaatatatcttggagatcttaccaaaagcacacagagacctcctgcgttgtgattagattttcattgcataatattccattgttcgtgtgtgtgtgagtgtttagttagtctcaaattgataggtgcatgaatttttccaatcttttgttaaggcaagcagtattgaataaacttgtacataatatttttgcatgtgtataattatatctgtagaatgagtttcaaaaaatgaaattgaaaggtttaaggctgtattcacaaacaattttgaaaggtattgattgcctaattgtcctccaaaaggtttgtcccaaactggactcctataaccaataaatcaaagtgcttgtttctccatagccttgtcaacagagggtgttgccaaacttttaactttttgccaatctgacaggaaagacatgatatctcctgtagtttttcttcttcctctggtaaaagcaaggttaagtgttttttcatgtgtttaataactatttttgtttccttttctgagtttcttcacagttcccgagacagaaaaaaggaaaaaggatttcagcagacagaatttcaacaacaattgtctgttaaaattctttttactttttctttcagagattgctagtctctttcttctcaattttaaggtgcattttaattgctaaagaggtcatttctttggatgtgatatgcatgaaaatatttctataagtttttcatttgtcttttgattttttatgatattttctgctactcggaactgctttttattttatgtagttcagtttattaattttctgtcctatggcttttacgatttggagttacagttag

SEQ ID NO: 746 - DNA, 1440 bp, Homo Sapiens
atggaggaagactcactctacttgggaggtgagtggcagttcaaccacttttcaaaactcacatcttctcagccagatgcagcttttcctgaaatccagcggacttctctccctgagaagtcaccactctcatcggagacccgtgtcgacctctgtgacgatttggctcctgtgacaagacagcttgctcccagggagaagcttcctccgagtagcaggagacctgctgcggtgggagctggtctccagaatatgggaaatacctgccacttgaatgcttccctgcagtgcctgacatacacaccgccccttgccaactacatgctgtcctgggagctctctcaaatgtgtcatcgtcccaagtgctgcatgctctgtattatggaagctcacagcacacgggcacctccaccgtcctggccatgtcatccagccctcacaggcattggctgctgacttccatagaggcaagcaggaagatgcccatgaatttctcatattcactgtggatgccattagaaaggcatgccttcccgggcacaagcagctagatcatcactgcaaggacaccatcctcatccaccaaatatttggagggtactagagatctcaaatcaagtgtctctacttccacggcatttcagacaccttcgacccttacctggatatcgccctggatatccaggcagctcagagtgtcaagcaagcttaggaacagttggtgaagcccgaagaactcaatggagagaatgcctatcattgtggtctttgtctccagaaggcgcctgccgccaagacgttaactttacccacttctgccaaggtcctcatccttgtcttgaagagattctccgatgtcacaggcaacaaacttgccaagaatctgcaatatcctgagtgcgttgacatgcagccatacatgtctcagcagaacacaggacctcttttctatgtcctctatgctgttctcgtcgtcaccgggtggagttgtcacaacggacattacttctcttgtgtcaaactcaagaaggccagtggtataaaatggatgatgccgaggtcactgcctctggtatcacttctcctttgagtcaacaggcctatgtcctcttttacatccagaagaatgaatttggaagacccagttacagggtgtccgcaggcagagaaccaagagctctttgtgctgaagacaattgaattgtggtgaaataatatgtcatgaataaatcttgcagcagatttatttgtctcactttgtaatcagtgaatgagctttaacgaatatcaatgcctagtgcctaccccccagagataagaacttccagtttctcatgtgtaatcatggcatctggattgctcatgattctgaagataattctcctgtcccccaaagtttcagaatcacttcaggtggtagaaagagataacacatcagtc

SEQ ID NO: 747 - DNA, 1595 bp, Homo Sapiens
gcgagcgctccagggcgggcttggaaatggagacaaactcctccgagccgttaaggctcagccggacagggcttaggagtcccgagcccagtcctgttcacccccattttatagaaagggaaactgaggcccagacaggggaaagtcacttgccgaggtgtttgctgcagactgcgttgaccgaacctgctttttcacagcagtcagacagcaagccctcccgtccctccaggaccctagttcctggggaggaaggcgttctcagcgataatgaccagcattaaagtgctccccgttaccggcgtcactgccccagccagtggaggccccggagagggactgaagatgtgtcacctaacttctctgaaccttcctccctcaaggagaactgataatccctaactcacagttctgtgaggattgaatgccttaagcatgcaggttaagtggctactgaaggcagtttttgtggacaggtgatttgggagcctggaggaagggttacgtgcgcgcgcgtgtgtgcgtgtgtgtgtgcgtgtgtgtaagaatctttccgtgagaggacatctgaggtgccttaggagagtaggagtggacaacagcatccaggcagaaggagcagcatcccaaggatagaaggtggagcagcctggccggcagggatctgaagcccagagagaggaagccactggctccaagtcacagagcagaaactggtcccagcgtcagatctgcgatgctgcccaggcatggtggtgaccctctctaaacaagcacactcagaatttccctggctcggctgggcgactcagaagaaaactggccatcagcttctgcctcaagcgggtgctgtggcaaggaagacagagcatgtgtgttgtgaacactcattagaggatcatccctgctgtgccaggtgccatggcgctggatgcagaaagcaggacacatggaaagatggtgtgttcacaaagaatttggaagaaagccagatggtgacaagagtgtgtctctgaatgccccttttgggggtcactaaaaatgccccagggtttttagttagaccaaaaaggaggcttcaaagagatgacttctgagccgggttgtgatacatctaggatgtcaacaggcagagaaagggcagggactgggagtaaggaaagaacatctgttcaaggcaaaacactgattaccaaagtttctatcatccttatgttgacaacggacataattttaaccttttgtataagccagactgtaaaggattattagcagaataaaagcatctattgggcctggtgcagtggctcacgcctgtaatccaagcactttgggaggccgaggcgggcggatcacctgaggttgggagttagagaccagcctgaccaacatggagaaactctgtctctactaaaaataccaaagtagccgagcgtggtggcacatgcctgtaatctcagctgctcgggaggctgaggcaggagaatcgcttgaacccaggtggcggaggttgcggtgagctgagatcgtgccattgcattccagcctgggcaacaagagcacaactctgtctcaaaaaaaaaaaaaaaaaaaaa

SEQ ID NO: 748 - DNA, 2276 bp, Homo Sapiens
tgtgcggacaattttacctgcaaggaagagacccaggacaagcatggaaaagctgtaccgtcttgaacagcaatggccactcagaagctctctgtgctgcaaccgaaggctgggacagttgagagctacagagaaaatgcccaggaaatgtcatactctgggactttagtctgagcctcaggataaaaaataattccatttacgtgtctcagtttattttttagaaatgatctaatatttaatatgtaaacatctccaagaaatggcagctgctgggaaatgaaaattccataatcattactgtcagtatttcaaagtctcttatggaaattgctatattctgtttccatatagtttcacattgtgctaattttgtttattttaatgtgctagaaataactttaaatttgtgtctaaaaaataactaacacggcttccaccctctggaatttatatgcatccaactcccaaagaatatgccttaatttccaactatttaagtcacagagggctaactccagaagatctactgaaaagtattaaatagaagtttcgccacgttgggcaggccagtctcgactcctgacctcaggtgatccacccacttcagcctcccagagtgctgggattacaggtgtgagccaccgggcccggccaagtttaactttttagcatcaggttctttgcagctgctgggccagatataaaatgctagtgaaaacacacatccctttttatctcttaagctattactgtgagtcttatgactacatttgaatcagtgttaccaatcaaacgaagttgaaaaaatcaatttgtgtagatgtgtacatctcactactgtaccttgctgacctccagatattcacgtgcctactgcatattaatctgcatcctggaccatttgcaacaagtagatccccacacatttatgtggggccaattttattcttccggtatttattcttcaaattcaatttgaattcatccttgcaaaaatgtttattgaggccctactgtgtgccagaaggtacatatactacatgttgggaagccacgtttactcatgactcagtcaggacacaagcttcggatatgggctacgcatgtggaaatgcactgcgtttactcatggttccgtttcaaagatagctcccttcacaaattagtttgcacttgccatacctttgtctataaatcatttgtgttgccccaacttctggtctcacagatgcttgcattaaaattgatcattactattgcttttcccataaatatcgttgtttacattttattgccacttgaatttcttctcctaaacatcaagacatctttcgctatccaccacatctacttcttcctttgctatcagaaaacaactggtaaccagttggaaagctgaagcaccactccgagcctggccaacggttctagtccctctcatgtgaatgtgcatgtgtaatgagaggtgacacacacgtgtgtactgtgtatgtgtgtacatatacgtcactaggaatgtcaacatgtcctcgtctttctctaactcctgcagtttctgactccctttcccgtactgcataacacatcatctcaaattcttcatgtgtccctagcgaatgcgatcttgatggtgctttctacctcctgagatacatctcaaagaaaggaaaaagctcattattcccaaggtggagatgaagaataatatgcaagagcctataaagcaggactttgctgaaagacattcgcacccagtaaaatgtggcacatgcaagagcatcagctcagggtctgcctagacacaggccattgagaaagttctgctgtactattccatgtatatgtaaaggtacaaatatctaagaggtctccttgaaagccaaaactggagaccagaaataagccagtaagtagattttaaaagctactctgagttatccatcacatatgtagcctgttttccttacaaaaaccaggccgagcatacaggttgcactgactgtcaaaagaataggtctctcctcctccaaacatttgattattataagtcaaccaaattcaaaagataaaacttccattgcttatatgagaaatctctttctaagacgtattactgtctgatgatttcaatcgtatttcatctctaacctgtacgacatagggcacgttgcctatgtgaaaagagagactgccttcatatcagacagacaagcatttagaatcctctccaatccataagcaacaacagttacccattagggaaaaaaaaagaa

SEQ ID NO: 749 - DNA, 2593 bp, Homo Sapiens
ttaaatggtttgtaaccaatgtttgatttgtcaaatccataattctggtaagacaataaaaacttcaggtgatacatttctagcacctgttggatatttgaacacttacagatggattttcttcagttgccactttccatgcatgttttctgcttgcctaaaagattttccatgcaggaaggctaatgctataacagtagctaaatgcttactagaacatatgttttccttatggggcattcctggagaattttccagtcatagaggtactcatttcactggacaagttgtaaaacagttaagtaaggtattacaaacacaatggtattaagcaaagctaatagaatcaattgtattaccttggtaaaaggtattactgactgatggcaatcagacctacccttagtggaaaatacagattaactccttatgaaatagctactggaaggcctatcctcctaataatagaagctcacatgtctcctgctcttacaaactctgacatgacacagtattgcaaggctttaatgcattatgccaaagtactagagaaagattgcccttgaactccattgaagggatcatcctaagtttttctctgtagcaaaattttagggcctcgagtcttggatccttgagttgtggggcttctctcaactcaaaaaggcacctccagactcttacaggctcactggagacctcaaggtaaaactgaccggagaggtttctcttcagaagcagatggcatcctagatgttgacagctttcccaaaatcacagatcatcaagacttctctcttctgtcactgtaagatctttgtcctctttctccttgtatttgttttctgtttatatgtggcaagataatgtgataactaagatttcataattgatagcttctgcagggaacttaactgaatgctgggcagatcatgttaaatctaaattattatgtgaccttagagattctctggttcaccctgtaacaaatttcactgatattccaagtgtggctatctgttcaaattgctcatctggtcctttatgtagggttaggtttttagatttatgggttcagattccctgtttaaatctaagagtagacaaaatctataatgagggttttgcagtaaaattatgccagaaattgactgagaaaaccaaagtaaagataattcaacagtttgtagacaaattaataacattaatcccttaattgtcagtagcctccaaccatgcaatgattcaataatggagccttagataaatattactagtgcttccctactgatgactcttaatgcataagacatcccacagggatctgtctgttgtgcccctctaggatatatttttatctgtgcaagatttaataacaaccatatgtgtgggcaagttcatgtctcaataattaaaaaataaaaaggaccaatgtggattaaggatcctaataatagtgtcactccataaccaattggaaacttcacattggtctaaacctcgtaatttgtagtatgaaataaagaggaatttgccagaaggtataaatgcctctaaatgggcatcttttggcagaatactcctttcttggtttggtataaatgtaaataaagtttgattagaaatctatgttaaacattagctactatagctgactctactgaaaaggatatagttatccagcaaacttctttaaattttcttgcttgagttgttttagataacataattgctttggactatctgttggctgaatggggggagtgtgtgtgatagctaacacctcctgctgcacttggataaatacatctggtatggcagaaactccgttgcaagaaatcaacaaacaagctacttgattaaaacaagtagattccttttctggttcatttttgatatatttgattttgaccagttcaatctgtgggggcccctgttaaggaatatacttcaatctctcagcattattttctgataaccatcataatagtctccctgaggatatgtgccatatcctctcaggaggtttaaatgttcatatgtagccatccgttgtatgtcaaatggtctcactacagttagaaaaacaaaaatatgaagagaatataaagagtcatccaagtgacttgttgttgtgaagtatgaatctcatactgagaacaaacaaccattgttatggtgacagagggtggcatcaatgcccaaggttttggtcaatctctcaaaatggagaaggagaccaaagaggggaaattgttttaaattaattttggcttaaagctgtttctgtatgtaacaactgcaacctaacttaagagtatattcttgtgataagtagctgagtctcagccaatcatagcagctgagcttcagccaatcatagcagctgagcttcagccaatgaaaggttgccgactgatcagaccacgtccatataaggcaaacgctgagctgtaaccaatcaagctgtttctgttgtcactttatttttctgtctgtaaatatgcctgcccacattgctgggtagaggaggttctaagtgcttcccaattcataaattgttctctgctcaaataaactctgctaaatttaa

SEQ ID NO: 750 - DNA, 1701 bp, Homo Sapiens
cagctgtggtaggctcacatagccagtgtgatcggtttttaagaggcagtgcttttcagcttttctccctgatatatccattttgcttcccagcactttttaggagtagtgagagcacttcctgcccttgttggaagccccagggtggacactcagcacgaaggtctctcccttaactgctgcccttccaagacttgctcccgagatggagtgggcgtggtcttccaggctggcccttccttctcctcaccgccaccttccctgccccagccccagcagccatgggtacatgggtccccagctcacctatggattcccgccagtctgcccagctgcagtactcacgccccatgggggatcttggtctgtttttcttgtgggagcctagtggagagcagacgtggctttttatgtgtcttgttggggaggtgacttgcatggtggggacaaggctgtcgtggcaaccttgggatcgagtttgagactaaaggatgtcatgagatccctggcttctccccatgttgttcccggacaagggcagaagggaggcatggcaagggacctctgctgtccttactcaacagtggtcctcatccctccccacctcccactgcttcctgcaagggcaccagttgtatgagaaagttggcctttggacttaggatttcttattgtagctaagagccatctgaagcagcaggttgcaggacaaatgcttcagtccgccgagagcagtaccgtgtggccaagaggtggactcagagccttccttgagctaaactcggccaaccaaggcacgcagcatgtcccctcaggtctccagtcagtccaggttgaccctcagttctggacgtgtgtatatagctgtatttaatacctcaaggtcattgtggctctggggatgccggggcaggaggacgagggtgcgctgtggacacagcagtccgcggaattccgttctgggaagccaatggtcgccggcaccccttgcttcctccctctgttgtctgcctgtgtgacacacatcaatggcaataacttcttccaactcctcgcagaagtgggagaggccggcagcctgcaccgagaggggctttcctctctcttgctccccgcttcgttctgttttggctgcagagagtggttcatccatactctcattccctcgcctccccttgtggacgggggtcttgccttttcaattcctgtgttttggtgtcttcccttatctgctaccctgaatcacctgtcctggtcttgctgtgtgatgggaacatgcttgtaaactgcgtaacaaatctactttgtgtatgtgtctgtttatgggggtggtttattatttttgctggtccctagaccactttgtatgaccgtttgcagtctgagcaggccaggggctgacagctaatgtcaggaccctcagcggtggagcctgctggggggacccagctgctcttggacaagtggctgagctcctatctggcctcctctttttttttttttcaagtaatttgtgtgtatttctaactgattgtattgaaaaaattcctagtatttcagtaaaaatgcctgttgtgagatgaacctcctgtaacttctatctgttcttttttgaggctcagggagaaactagcatttttttttttccaaactactttttgtcactgtgacagttgtaaataaagtttgaaaatgctttcc

SEQ ID NO: 751 - DNA, 3788 bp, Homo Sapiens
atagttctcctccttctcaaaagcccgtcacctccccacaattacatattgccctagcttctttcctgcctcctccttttccttcctttctcatttcttcctctcttccctcattttcttgcccattcccttccttcttccctcttccctcttcagagtaaaaacaaattcctctttttattctttccacaacttagtcatttgtgtgtgtgtgcgtgtgtggccttggctcttgatagcttcaaaatgtcttcttctcccagtgacttatgaacgtattttcttacacacaggcagtatcctctctatgaattcctttcctttttgttctcctgtaatgtccaacctaaatgccatctctccctttcctacacccagacatctgattctacaccctgactctccatcccacttaccaacccccagtcaatggtttgtgtgtttcttgcttagctatttaagcttaattgtctggtgtgccctaaagctgaaatttctctatttttcatgtctagtaccaggttttagttttagtaggtgtttaataactactaaagtaaatctgaaaaagtaaccaaagctgggaagtcactaaatactcactcagtaatcacagcgaaattgaactctgtagccttgtaaaacacttgtctgcatattaccgtgaaaggaggaaattactgggattaatatttcaaagacaacagtagtcccttagtagggaaaatatatcagatgatagccaggaaaatgcattatataaatcctcattcccagtaaaatgtaattcagccttgaccaaaatatataagtaactcatccttgattataaattcatggttaactgataagaatctgagaggtttctttagatacctcttaaaatatctaaagaattcagcgatgctgagtaggatctagataaaaactatctggcagaaaagctttgtctcacaaggtgttacctacctgcttttaggacagcttggcacatagtaggagatgaagtgcttgatgattgactgaaatgtacaaggagaaatgtacaagactacaccacgggtggcagagatattgaacacagcctgtcaccttgccctgtaagatctctggctgtgtatccactttttgagcaagagacttgagttcagaagacctgaattttaatctctcagctctgctataaatgtgggatcctcagtaagtaattttacttctctggacttggttttatcacctgtaaaatgaaaaccgtgggcttaatagatctctcatataggcttgagttgcttgtatgactgtctgtagttgtttttagaaaagtaatgacaagtacatggaaataaatattcaaatactgtagagggcaggtaataaggaaatgtcatctttcctgtgccctgactcccaggtctttctcccaggtcttagagtaagcccctttggctaattctgtcttattcctctaaataatatgttaagtctctgtttcttcatttgttaatctacacaataccatttgtctttgtattattcaaggtaagaaatttagcatactaccatcaatattttaattttagatatatatttttatgatttacatccatttcttttattacttaaatagaattaaagcactatttcttaacccatcagttttaagtagtattcctgactctctttgctttcttccacttctcctcccccttatatttcctagcttctgtcagttaaatcatcacttttatattgtccaaagttataatatttaaattctcttttataactctggttgtcttaagtgctgtaactataggttaattctgaaaattgaaagtcaatacagtatcattatgtgaatattatttactgcaaaactacgaaatatgcctggacgtgcagatgacaaggtagtcctgtttcaccaaacctgggccacttgaacaagaatgctccaagcattgaagtcacattaattctcttattatactccacaagttgctcaaaatcattctacatttttagctggcttcgtattgtgaatggctttaattttcaaataccctcaaacttgaaatttagattggtagttctcaaacttgactgtacattggaattactgagggagctttaagaaatctaatagttagaggatcccaagtctagggtttctgatttaattgagctggggtgtggcctgagcatctcagtttttaaaattttgcggcttgattccaatgactagcaagagttgaagacctttactgttgaaacccagtcatgtctagtagagtcaaaagtaatgaaatacactgagtctttggacagcaagagcagaaaagtgaaacccgatagcagctgaaggtttatagaatatttatttcttttttggttgcagctatctccttcccaacctaccactgctaagactgtttcataagatgcacttctctacactcagctaatgaggtgtttcaatcagcagttgttctttggatgaggagccgatattgttttaaagcctattattttcttgggtgggtattctggagcatggggagctgaaagtgttgcaaggaaactgctgtgtgaaatttgatcaggtccttggtattcatttttatgtttcaataactgatttattttttcccccttgtacttaagatttaacatgtgttgtatttccagcagttcaaatctaattgtgtcgaatttccaggattggaggaaaagttgctccctttcagccctcctactagaagcactggagctaggctggcgggcattggaccctagtaggtatagcaggctgtgaagagcgactgggtggaagcagccccagaagaacccgtgtgaacatactgtcctttggccgcctggcagttagcctagaagacaaatatgagagaggagactggttagagtaaatgtgaccccaccttgaccctgtctgcctctcatgggaaaccagtcaaaccttcactcagattttcttctttttacagcaatgttgctgaatattgctggggataccatccccttctataaagtatctcccctttttatcccagttttctgagcatttctttggtaagcttgaggtttgtgtcagttactggggaaatctctgttcagtaccaacaatattgcagcaacagtactagaaactaaagttgaaaaatttctcactagtatagtacactataccaaaagaaaaacatgtttattttaaaaacatttccattttctacctatattggtctagaagaatatgtaatttttatttagttattgtagtatcatttgctttcctgtatacattccagttaaagataaattcagaattatgaaacttacgacaatatttgaatgtcactcagtggtaccacttcttccagtcagtgttgctattgtctgttctctccaggacttatttctacattttacatcaatggttctccaactgtgtttcatggtctaccagcatcccttaggaacatgttaaaaatagaaattccctggccttacccctgacctactgaattagaaactcagtgggtgagacccataatctgcatttttaacaagcgcttcaagtgggggtaggggaaatgaaaagaggttggtaatgggtacaaaaatacagttaggcagaaggaataagttctagtgtttgatacaacagtaagatgactatagttaacaatgatttattacatattttaaaatagctggaagagaagatttggaatgttccaaacccaaagaaataataaatatttggagtg

SEQ ID NO: 752 - DNA, 2261 bp, Homo Sapiens
atcagacttagcagcatcttcctgtcccaagagaagaggggatgggaggatggcatggttcagggcttaggggaggataggggagaaaaagtggaagcaaagggagaggcccaggaaggattttgttgcgacatgttacctgggctgcacctgctgtatgcaagagaagaggctgggagtcccctctgcagggtgttcatgccccatctctgtgccacgaggagttgggctgctgaaggtgagtacagggaggttccctgtcatctcaaacctctcaggctccacagtactgtttcaagtatccagagctttcctgcctttgaaaagcaaaaagttgtctcaggagagacagtgtgatttttgcaaggtcatgcagggtcacacaagttaatagcaaaactatagtcagaattcagactttctaacacaagcatatgacatgtatacttgtcccaggactctatgttctatgttttcctcttgtcacatttatggatccagtccaaggcagagagaacatgactctgaggtcaggcagatctgcaagggaatagcagttcttctcaggattgttgaagaaattaaatgagctcgaatatgtgagtgcctagcctagtacctggcatggggggttatgcattcagtgtgttgctctccttcccttccaaggtagcctggctgttatctcctttctggaaactcattgagcatcagagatcttgacctccttgggcacactcctgagtttatttaggcctacatttataggatgtgtcaggagctcaagtactttatgaacagagattaattgctcttatgatttaatgcattggccacccacactggtgagatgctccctgaactatgctatttgagaaacaatgaaggaactttgtgaggctaataagatttgtgctgttaatttaagtcttgaggatgtggactacagagagtataacattttatagaatttgtttaaagctacactctcatctttgccataacctggcctttcataatacattcccgtggccacctagcatcatgggtaaggctctcatcaaatgcttcttggagagcaatgcatcttgcagaacaggaggtgggaaatttccacaagggaatgactatgaatggggtgggagaaagacagggaagcaggggaagatcatttccattatttgttcagtggtgattttgggtgaacatctctctttagtccagaatgggcaggaaaatgatatgaattgtaattgttggcaagtgcgaaataatatatttagtgaggaatgtagtgtgaagcacatgaaactgcactgtcaggaagagaagttgaatctggggtcagaagaactggtttccattcctggttctgcaaactgccatcaaacttgaaggactcattctgaggcagagaatgaataaatcattacctttgtgaagcatcagaatcagcagcactttcctgtcccaggagaagagggaaggggaggatggcacgtttcagggcttaggggaggataggggagaaaaagtgagaagggaggctgacagaagtgttgcagacactgcaacacttgcatacttaacactgtatactaaagtagatgttaacctgcgctgcaatctgtatatgctgattcagctgtaatccagtcgctcacttgttacactcttacattttcaccagtaagtagtccttgtgcctccttgtatgggtggcccagtctctgatactagatcagcagcttcagcttcatgcagagtccttcctttgaaaaaccagcttttgcttgattttattataggatcttggtctcatgttagtgtctctctacctcagtcttcccagaatgtaggaattcttgcccataatattaggccagtacttttgttctaggcttatctcaacagacctgatatccaccttttctcttcctattactcagtaagcatccatctttagattgtgaacatacaagacgctggcctttatagggcctcttatctctgtcacagcatggagttttcatgaaaacaaggggctgagaactctgctggcacatagtaggcactcaggacaggttagctgctttcaatattatttttctgttcgtagatgtcttagcatgattattatttttactgaaacccacccaaattatccatatggaacagtgggctctgacccaggaaaggggggcccaggaattactgtactgcctgttgagcacgtgccttagtgtgtccatctgtctgct

SEQ ID NO: 753 - DNA, 2854 bp, Homo Sapiens
agtttcagtgtcttcctgtggtctgtgaagaagagaaacttaacaacaagaagagggaaagggaaggtcgcctaaggagaagacacaggagtaatgagaagacacaggaggtagagcagcacttgctgactcagaagcattaacatgaaacgctggagtgcagggcacaataatggttgactgcagcctcaacctccagggctcaagggatccttccacctcagcctccccagtagttgggattacacagatatttcaagattcagcatcatttcagaccctgaaaaatccctgaaaattgaattctcaatagataatgcaactccacataatatctggattttgtaaatgcttgctaataaattattttacaacgtgggtgagtttaggtgtgtaggtgatttccacacattgagagccaaaacatcaaattttaatgttggtctggtgaaagagacataatatttgatggttcatgaagaatactacaacataataagcattttagatccagggttatttctttgtatgacttatttccttttatggccatcaatccaaattttaaaaataattttttaatatatttaagatgttgtcatgtgtcctaaaatgacaaaaataaattagacacatgtttaatcatcattccagtttggtttattcactcatattttattgcataaaacaagtcaaattatttagcatgatgtcaaagtcttaagtgtaaacctcttgggggaaacagcaaagaattgggaagaatattacagtctatcatgtgaatttcatcaccacaatcagaaactaacacaaaacccagaagaaaccctaagaaagatacctgtaacctgaagaagatgtagactagatgccaaagacagagaatgatctgaatggaaaattttgcagctaaactattttcccttttttgtatgtatcagggcaaaacagtgcctaattttctcctcattttctatcatgaggcaagaaaacacatctgtcaaatgtggcagggtaacctcagagaaaagctggagacaagctatggtcataaatgtatgctaaatagatggttcaacataagaaaatgtaacaagttaattcaacacattcatagacttgacttcaagagaaaatttaggcagcattgcaatagaagcagaaacacatttgaaaaagtccagtatttatttgttaaaaactcataccaaattgtaaagaacattgatgctatgaagaaactgcatcaactagtgggcaaaataatcagctaggcttcataatggcaggattaaatgcatacctaacactattaaccttaaatgtaaatgggctaattgccccaattaaaagacacagactggcaaattgaataaagaatcaagacccatcagagtgctgtatgcaggagacccatctcatgtgcaaagacacacataggctcaaaataaagggatggaggaatatttaccaagcaaatggaaagccaaaaaaaaaaaaaaaaaaaatgcaggggttgcaatcccagtctctgataaaacagacttcaaaccaacaaagttcaaaagagacaaataagggcattacataatggtaaagagatcaatgcaacaagaagaattaactatccaaaatatatgcacccaatacaagagcacccagattcataaagcaagttcttagaaacctacaaagatacttagactcccacacaataatagtgggagactttaagacaccactgtcaatattagacagatcaacaagtcagaatattaacaaggatatccaggatttgaactcatctctggaacaagtggacctaatagacatctacagatctctccactccaaatcaacagaatatacattcttctcagcaccacactgcacttattctaaagttgaccacatcattggaagtaaaacacttctcagcaaatgcaaaagaacggaaatcataacaaactgtctatcagaccacagtgcaatcaaattagaactcaggattaagaaactcactcaaaattgcacaactacatggaaactgaacaacctgctcctgaatgactactgggaaaataacgaaatgaaggcagaaataaagatgttctttgagaccaacaagaacaaagacacaacgtaccacaatctttgggacacatttaaagcagtatgtagagggaaatttatagtactaaatgcccacaagagaaagcaggaaagatctaaaatcgccaccctaacatcacatttaaaagaactagagaagcaggaacaaacaaattcaaaagctagcagaagtcaagaaataagtaagatcagaacagaactgaaagagagagagacacaaaaaacccttcaaaaactcaatgaatccaggaacaggatttctgaaaagatcaacacaattgatagaccactagccagacttataaagaagaaaagatagaagaatctaatagatggaataaaaaatgataaaggggatatcaacaccaatccaacagaaataaaaactagcatcatagaatactataaacacttctatgcaaataaactagaaaatctagaagaaatggataagttcctggacatatacaccctcccaagactaaaccaggaagaagtcgaatccctgaatagaccagtaacaagttctgaaattgaggcagcaattaatagcctaccaaccaaaaaaaaagtctaggaccagacggattcacagccaaatgctaccagaggtacaaaaacgagctggtaccatttcttctgaaactattctaaacaacagctatccctaactcatttgatgagaccagcatcatcctgataccaaaacctggcagag

SEQ ID NO: 754 - DNA, 5536 bp, Homo Sapiens
cctaagtttagtagaagaaaggagagaaaatatagcctagcttataaatttaaaaaaaaatttatttggtccattttgtgaaaaacataaaaaaagaactgtcacatcttaatttaaaaaatatatgcttagtggtaaggagatatatgtcaacttttaagaggttgaaaaacaaacgcctcccattataagtttatacttcacctcccaccactataacaacccagaatccatgagggcattattacaggtttgttacacaggtatacacgtgccatggttgtttgctgcacccatcaactcaccatctacattaggtatttctcctaacgttatccctctccttgcctcccacctcccgacaggcctatgtccatgtgtactcgatgtttagctcccccttgtaggtgagaacatgtggtatttggttttctgtttcagtgttaattcacttaggataatggcctccaactgcattcatgctgctgcaaaggatgtgactttcttcttattagctgcatatattttgtggtggatttgtaccacatttactttatctagtccaaagttgttgggcacccaggtggattccatgtctttgctattgtgaatagattccttaaggatctagaaccagaaataccatttgacccagcaatcccattactgggtatatacccaaaggatgataaatctttccactctaaagacacatgcacacgtatgtttattgcagtaatacttacaatagcaaagacttggaaccaacccaaatgcccatcagtgatagactggataaagaaaatgcagcacatatacaccatggaatactatgcagctataaaaaagaatgagttgaaggatccagccccaaatgttaatagtgctaatactgaaaaatccacttctaaaacaagtgtcagctgagcgtgatagtgcacacctgtaagcccagcacttcgggaggccagggcaggaggattgggcagtccagagagagagcttctgggggcagctgcgacctcactgggatcaactgggattctggggccagttaagtccgttttccacgttgactcttccagaaccagaaatgtgcacactgaacccactcctgctgaagaagactgctgtgactgatgcagatatgctaacaggcacaggaaaaggatccaggtgactttcttgttaaagaagtgcatgcattttctatccaccgaaacccacacaacgaaatataatacagtttaaatataacaaataacatatgacaagtttaaattttttaaatgtttaagtatacagtagtccccccaccaccttacatgttccaagacccccagtggattcttgaaaccaaggatagtattgaaccttatatacactatgttttttcctgtatatatgataaggtttaatttatgaattaggcacagtatagattaacaacaataaccaataataaaatagaagaaccaagtggcccataaccatatgacaagatgctgtgtcaggagagctcttggctgtaagtaaagagcacctaactaacaatagctcaaactaatttgggtttacattctcacataccaaaaaatcccatgctccaatacggaggagtctcagaaacattattctaagtggaaaaagccaggcacaaaggtcacatattgcataattgcatttatttgaaatatccagaatgggcaaatttgcagagacagaaaatagattggtcgttgccaggggctgggatgaggagggaaaggagagtaattgcttaatggttatgaagttttattttgggatgatgaaaatgttttaaagctggatagaggtgatgggctattactaggtaagtttcagggaagtcaaaagttatacacagattttcaactgcacgagggggttggccctccccctactcccatgttgtccaaaggtcaactgtactataaattcttgttacctatagtcaccctactgtgctctcaaaccctagaacctattccttctaactgtattttgcacccaatgttcccaacacaaacatgataaatgtttgaggtgatgaatatgccaattaccccatgaaatgcaggcaggcttctgatgattgtgaaatggaatcttatgcaaaaaaaaacaaatagcctttccttgcagccagccagtgtttaggcagcacctgccacacacccagcactgggacagcttctttgactgttgagccgcttttcctgtttcttttctctttctttaactcttacacccattattcgaatattctaatcagatctatcaatcaaagcaaatactacttgccaagaattgagctacatgctaaggttacagtggagcaaaaacaacaaagtccctttcttcttgaagcttatagtctattggataaatacatattaaatatttaactgcaaaaacaatgtatttcagccatgaaatcaaaatggatcagaaacataaacattaaagctaaaactaataaaaatctacaggaaaacataaaagcttcacaacactggctttggcaatgatttcttgggtatgacgacaaaagtgcaagtgacagaaggaaaaatagatcacttggacttaaacgagattaaaaactgttgtgcatcaaaggacacggtgaaagggcaacccatggaatgggagaaaaaactgccaaccaaaaatacatagaacacttaaaaatggtttaaataattttatctatattttaccataattatatatacacatgtatatatgtgtatatatagtgtgtatatatacagacatatatacacttgtatatatacaagtgtatatcccaggttggtctcaaacccctggcctcaagccatcccccagccctggcatcccaaaatgctgggattgcaggcctgagccactgtgcccagcctaactcactcttcttgagcaatgtagggaagcaggtagtaaactgaagtgccacatgcttgggccagattccttcttgcctcagggcctttgcacatgctgttctctctctggctgctcttccctacatcccacccccctcacttacccgagaagcttgaagaacggggatcctctcctgtgggcaggggagccccagcttccctcgtgattcccgtcctttcaagttcattatggcagctctgtcaatgagcaccccagggtggtgtggccgcagcaccaggacccgcgctgaaggcccagagacctggcaggccgggaagaaattcctttcctttgggaagaaccaccaacgctcagtccaagctcacacggttatctagtcggcaatgccaaaaaaccacggctacaaatgaactggtgagctggctcctgctctgagactgccagagcttctggtttccactgccttggagactgctgtctgcatttgcttagacaacccttagcgaggccttcatctgctcttggtcgctgtcaaccccccacccgacagccggtgccgtgtagaaacagatcgtccctgtgagacactggagctggaccatcgactccactgcactgcccgagattgaggagccagagaaaggcccggcaagcccaagtcggaactccctccagatgctcccgagccccatggcggcaggcgtttctttgttaggcttttctggggtcatggagattttctcggccctctctgtgagcctctagccttcctccctttcacctcctctctcccactgtatttcccatgtactccagcaacggaacaaaacccaaagcagtgcccttgtattaactggctagctgggctacccctacatagtgaaactaaggttgagattggccagaagccagattaatgaaaaataaaattgtgattcatttccaggcctcttaaacctgaatggtcagattttgtggctgagattgatgagtccaagttgccaatgttggggctatttattgtcaatagtaatttcattaaaaaacactcctgaagggaggtatctgccatggtgtgcgtgggtgtaccgcctcgccaccggcaggcacaactgctctagattaagaagctcaaaatatacgacagagctacagtaaacaaaacagcatggtactggcataaaaagacacatagaccaatggaacagaatagagaacacagaaataaatcgatatacttacagccaactgatttttgacaaaggtgccaagaacacacaacggaaaccaccaaagtgtctagctaccaatgaatgagtaaaggaaatgtggtacatatgcacaacggaatactattcagccattaaaaagaatgtttggttactctaggcacctcatgtaagtagaatcatacaaaatttgtccttttgtgactcgcttatttcactgagcataatgtcctcaaggttcatccatgttgtcgcacgtgtcagagtgtcctttctttttaagactgaataatattccattgtgcagctgaacctcattttgcttatctattcatctgtggatggacgcttgcattgcttccaccttttggctgttgtgaatatgctgccttttagccacttattcagaaaaaaaaaaaaaattaaacacggcacaggccaaataaaagcacatttgcaggtccctgcagccggacagccatgagctttgacctctgcactcattgaatctctctcctgactgacttctatctttctactctctgtaggaaatatcacaaaggtgttaccatatggagaggtgaggaggagtgtgctgcccaaaaagtggtgtttcaggctcttgtataatcacatgaacatctttaataagattctggatacaagaatttaaagtagtaattagtctcaaaaaaaaaaagaaaaaaaaaaccaacatgggcaacagcagtccaggaaaacttcatggaagttgaaagaaagccaccaacccctctccttcctgtggcttttctaactggaactggaactcagaaagtacattaatcaccaatttgggaagctataggaaagtatgttttctaatatacagtgagagaatgtgactgataaaaccaattttcttgagactttctccctggaaagtgaatatatgtattcatagggccttcacaagcacagactaacaagcaaagagctacattcactgggaaggaagactcaaaatttaaaaatagaaaaaaaaatgatggcccagaagagcaagttcagagtgctgttcatgagtgatccgcatgggaccgcgatgcctctgacgtctgccatcctggagagcagcagagcgtcactagcagccaaacaggaagacaagtgtttcacggacataagaaatttaaagtggaagcactttctagagcacacaaaacagcctccctaacacatgagaagtcaccagcaacacagaaatcaccaacaagtaggtcaccacatttttaaagatcataggaaattgttcacgccaacaaatctcagtgaacctcagctctcagccttgaaaacaaggatggctgtactactcacttttttcttcttcttcc

SEQ ID NO: 755 - DNA, 3715 bp, Homo Sapiens
aggcgcgagcttcctgcgcctgctcagcagcctgaggccgcggccgggtgccctcctgccctcctggccatccagggattgggtgtcagtggcctgttgcacattgtcacttctacaagtgactaacaccgtcaggataatctaaaactacgaatactacctgactccacaagggtacggtgtattctccagttttagcatctgccttaaaaattacctcagagttaagcactgctggggacttatttctactcttggcaggaggagaaaaggaaatgacatcagaggtgctttgctaaagatcacaggaactgcagctgtggccttcctatttcgcagttttccccttaaatctttacacagattcccatcagagtacagtaaaacaaaaattaaatagaattcatatatttgaaatccttggcatcaattcactccaggaatccaagacagtactcaactgaaggggaagcaagcacaagggagatttctgggacactgatactgttccgtttcttcatctgaatgctgcttatgggccttgttcaatttgtgaaaattcatgactttgtacatttatgggtttcactttgtagctcaggctggtcttgaactgctgggctcaaactatcgtcctgcctcagtctcctgagtggatgggattataagcacacaccaccgtccctggcataaaatagttttttaattcacaagatttaataggtagattaaaagaagaggtaagacaaaattaaaagaggtaagacaagagaaggaaaagtcagactgacagattataagttcctatggtacacagtccccttagattggaagaaaggagctaagagggtaaggaagcttggttgccagttttttataactggcagcctggtgatattgggtgtggtagctgagatgtcccaattgtagtcacaaggcctaaaaaagcagatctttacaaatgtttaaaaatactagctcaatgtaaataagcatgaatgttcttgacctccttactgtgccctgaatgtgccaaccacactctcattccaccatctttgctcctgcaatgctgtttgcctgcaggccttcctgccaggagcttgctccttctctctgtccactctggatataacagcccttgcccttctccactttacgctctcttccctttctcttcttgtacctttattttcctgcatagcacccatgattatctgatctatttttttccctttttttttcattctggtgcccaggctggagtgcagtggcacaatattggcttactgcagcctcagcttccctggctcaagccatctgcccaccttagcctcccgagtagctgggactgcaggtgcacgccaccatacccgggaaatttttgtactttttttgtagagacagggtcttgctatgttgcccaagctggtcttgaactcctgagctcaagcaatccacacaccttgacctcccaaagtgctgggattacaggcatgagccactgcacccagcctgatctattatttatttaccagtaccttccctactggaatgaaagctccatgagaacagagtctgttttgttcactgctataccccttgtgccaagaacactgtctgacatataacagtaactggaatatttaatgaatgaatgaatgaatctaggtatatgatggtgggatgaggaaataaagagatagaaaatgtcagtactgtataggtttcagggacaatgaattatcaatacaatgatatattgcctgaatttcagcatatcttagtaactgccttaaagttacagaaggactgagataatctgttagaatgtgaacaataagagcacctacctcacagtatccacataaattgtttagtgcagtgcctggcacagagtaaatgctcaacagttgttagttatgattaagtctgaatagtaactcacacactaaagtaaaattgaggatttgaaacagaaatcaggatttccgttcctcctttgttaaaactaggcacagtattcaacagtctaatcaatttctaaaagtaccatttaaaactgaggtatttagtaaatggtttatagactacttagctctgtaactgaaataaattattctccaaacacggctttcctcaatgagcttaatgaatgttttctgtttaccattattgatgcttttacaaatatctcctatgcctccagaatgatctcggtgccagtgagtcactacaatttcctggattgctgtgttaaattcagttagagcctgctttaaacagctgatgtattctggaattgctggttctccagtgtcaatgaggattctcctgaaaattaaatggaagataatcacacaattggaacactgcgttgacattagcattattttgcacacagataatttacattaaagaaactgcaaaaattattttacttttaacatgcacaaaaaccagctacatcacttcagcttaactacagtaatctcaccctaagaaagttttctgagaaaaattagagctaaatataagtctgaacaaggaataatagcagtcatcttgaacatttacatagcaattaaaataaacatggcaccattccaaggactttacatattttaccaattacattcctcgtaacaactgtttaaagtagatattttatcattatatttagaagtaacttgcccaggttactctacagataaatggcagaaacagctttcaaacccaggtattctgatgccagaatatgtgcttttatctatctgcctttgagatctcatatctcagtatatttcaaaagttttatagatatgaaagattttgattcaatggcacccctaaagaaactagtctttggcactagatatacaacttatcactgaagttttatattagcaccctgacacatgaaaatgaaggctttagtgaagcatgggaaaaacatctgagctattttctttctttacttagacaaccccattagctgtattttttgcttgtggttctgaatcttccttatattttgtttgcccttcctcacgattttatgaggtggcctttctctgtgaagttttgctgaactaaagacatgggggtgacatgttcctcaagatccaattcttttttttttgagacagggtcttgctctgtcacccaggctggagtgcagtgttgcgatctcagctcattgcagccttgacctcctgggcacaagcgattctcccacatctacttcctgagtagctgggactacaggtatgtgccaccatgcccggctcatttttgtattttttgtagagatggtgtttcgtcatattgcccaggctggtctcttaactcctggggtcaagcaatcctcccacctcagcctcccaaagtgctgggattacaggcgttgagccaccatgcccagctcaagatccaattcacaaacttcttcactcatactgtttcacagtaacacctcaataattcaggctggctgacagattagccttgatgaaaagtctgagttattcattaattgatcaataactgtttatggattacctaatatgtgctacaaatttgtttcttgcagtaagcaggacacaacaaccctgcttacattcaactgttggtgagaaggggaactgcatatgactggaaataaacaataaaagtaacataccatagaaagcattttgcaaagcattaaaattaa

SEQ ID NO: 756 - DNA, 3011 bp, Homo Sapiens
ggtagcaggcggaagtgcggccctcgaggcggtcgcggcctgtcggggcttggagcgaatggctccaaggccgcaggctgggcctgggccgcagccgtgggaagccgacgatgcctgaggcgctctgtcctcggcccaccctaggaacttgtatgaccgcaggaaaggatcaggagaggccgctgcccgtctcccaccggctctaggctccctcggccgaccgatgtggggaaggggaaggggcccgcgccgaggctctaggggaggctcctaggccgggttctctgacttaaggccctcttggctgtggttttgcgggagtgagttgagggagctgcattcactcaagtccctcacatgcccgagggcccgggaatcgtgaagccgggcctgcggacccggtgggaggaaggagtgcgaagcgcggccgccgtgctcggccggcgccgggctaggtcgggcggtggggaccgcgccggcataggacaacgcggtggagggaagcacctgcccccgcccaccttgactcagggccgccgcgcccctcctgggccatccgcgcgggggtctcaggatggcgaaacccgggacctcgcggccctctagtgctcccctgccagggtgcgacctaggtaccctttatcgagccccactccccaaggcagagagagttcgacgttcccaaggagggagtctccatggaggaattcgtcctgcttcacttccagagttgaaagcccgtcggttctgcaaagaggagcagtcgggcgcgggctagcaagcagctgatgaaaataattgtcctcgcacacacagccctgcgcccaggggcgcgcgcgcgcacacacacacacacacacacacacacacacacacacacaacttgcctcctctagccgcccaaccttaatattccgggcatgcagttttcaacaacttgcctgacacaataacaaagacatttaaatgccaggacgcagacttcactttttaacctgctgagaggagctactttcaaagcttccccaccgcgaataaactgacaaaaaatatggggtgcacttataaattaaacaccttaccctcaaagcaatatacgttaatcaggtttctaaggcaatagccatctctgtcttttcctattcacccaaataatgcccccagaaggaacccctttacacaagagagaactggaaaaaaaatgaattatacccattgctagtaaaaaatcatcttaaatcaatagagcaccacttgaacttgagtttctattgtttcactgaatcatcaatgtttttaattaaacagagctaccctttctgttaaaacattacataaaagggttaggtttctacttttgttgaggcagctggcgtttgttggctgttgtgtttgagcaacagactgttcaatggaagcgagaaatagctcaacgcgctcttaatagacctgtttcaacaatgtatcttgaaaaggaatacattgtgttattgtgttagtttgctacaaacctattaaaagaaaaatagcatccatcaggtctaacaagacgcatttgtattatacgtacttatctgcttcaaatacacttcttggcacaatgtctagaattcaactagatcatcaggagctgggcagaagaacgcataccagttaggtaatgatacacgggctaaaaataataataaaggaaggactaagcagacggtaattgctacttttttgtgtatcatgagaaataacaggcaaccctacttcaattaaaaatatattgcaaaagtgtggactcctacgacaaaaacaatttaaaaaatatttgtagcatgggaatattgatccatatcccatatttggaacgaatctgatacactttcgataggaatttgtttcagagaaggattcagggcagaagcgatgcatttttaaagcagaattaaaacagcgcaaagagcccggctctttagggaaatgcgcgaaacaaacaaatcgaaagcaagcgttccagccaagtggttggggagcaccgttgtctggcactaggaaaggaagtgcttcttgaaagtgttctcttaaaaatgattttccagacttattttattgcattttaatcacaaagtgaaacttaaagcaaagaaacaggacattcccgctaccgaacagaacctatcgtctattgcaggaatgactgctacttggaccacagacctttagaaaaaacagagaggcaaatgattaggctaatttaacgcggagatctgcttagcagaaaagacacccaaagtagcatctgtcagaggaaaacatcttttgcttccacacaaggcactcgatttggtttccaaccttgagtcctcaacattcaactttcaagtgcaacaatgttggaggcacaagagaatagtagattacctacaagtgaacacaattgtacggaaaagagacttacataagttacaatggcaccctatgtgagatatctactttaacaaatatgtagagcaatattttgcccaataaagtcaatcatttgttacatttttgaataagtaaattatcacatgaagatttagaaaaatgttaccctgaaacattaaacgatagttttgccatattacaaaatagctattttaaacttttgtataaggcatttgaagccaaatggctgatatgactgttctcttcagctggaacattttttttcttctcaagaagggtgtgtgtgaatgatgtgtgtgcatactggaggtagttgagaagaatttgattaatacataagacttttcactaatgtctcccctctaatccaaatttactttttaaattaattcacttggatttaaaaacagaaatgagataataaaccacaaattacacattataaaaattagtttctccaatgtatatgatttttggaagagtgcattttcaaggtgagaatttttgatgtgtctgataatctgccagatatgagaggaatgtcacaataaaattggttttgccatgatatgaaa

SEQ ID NO: 757 - DNA, 3010 bp, Homo Sapiens
ggtagcaggcggaagtgcggccctcgaggcggtcgcggcctgtcggggcttggagcgaatggctccaaggccgcaggctgggcctgggccgcagccgtgggaagccgacgatgcctgaggcgctctgtcctcggcccaccctaggaacttgtatgaccgcaggaaaggatcaggagaggccgctgcccgtctcccaccggctctaggctccctcggccgaccgatgtggggaaggggaaggggcccgcgccgaggctctaggggaggctcctaggccgggttctctgacttaaggccctcttggctgtggttttgcgggagtgagttgagggagctgcattcactcaagtccctcacatgcccgagggcccgggaatcgtgaagccgggcctgcggacccggtgggaggaaggagtgcgaagcgcggccgccgtgctcggccggcgccgggctaggtcgggcggtggggaccgcgccggcataggacaacgcggtggagggaagcacctgcccccgcccaccttgactcagggccgccgcgcccctcctgggccatccgcgcgggggtctcaggatggcgaaacccgggacctcgcggccctctagtgctcccctgccagggtgcgacctaggtaccctttatcgagccccactccccaaggcagagagagttcgacgttcccaaggagggagtctccatggaggaattcgtcctgcttcacttccagagttgaaagcccgtcggttctgcaaagaggagcagtcgggcgcgggctagcaagcagctgatgaaaataattgtcctcgcacacacagccctgcgcccaggggcgcgcgcgcgcacacacacacacacacacacacacacacacacacacacaacttgcctcctctagccgcccaaccttaatattccgggcatgcagttttcaacaacttgcctgacacaataacaaagacatttaaatgccaggacgcagacttcactttttaacctgctgagaggagctactttcaaagcttccccaccgcgaataaactgacaaaaaatatggggtgcacttataaattaaacaccttaccctcaaagcaatatacgttaatcaggtttctaaggcaatagccatctctgtcttttcctattcacccaaataatgcccccagaaggaacccctttacacaagagagaactggaaaaaaaatgaattatacccattgctagtaaaaaatcatcttaaatcaatagagcaccacttgaacttgagtttctattgtttcactgaatcatcaatgtttttaattaaacagagctaccctttctgttaaaacattacataaaagggttaggtttctacttttgttgaggcagctggcgtttgttggctgttgtgtttgagcaacagactgttcaatggaagcgagaaatagctcaacgcgctcttaatagacctgtttcaacaatgtatcttgaaaaggaatacattgtgttattgtgttagtttgctacaaacctattaaaagaaaaatagcatccatcaggtctaacaagacgcatttgtattatacgtacttatctgcttcaaatacacttcttggcacaatgtctagaattcaactagatcatcaggagctgggcagaagaacgcataccagttaggtaatgatacacgggctaaaaataataataaaggaaggactaagcagacggtaattgctacttttttgtgtatcatgagaaataacaggcaaccctacttcaattaaaaatatattgcaaaagtgtggactcctacgacaaaaacaatttaaaaaatatttgtagcatgggaatattgatccatatcccatatttggaacgaatctgatacactttcgataggaatttgtttcagagaaggattcagggcagaagcgatgcatttttaaagcagaattaaaacagcgcaaagagcccggctctttagggaaatgcgcgaaacaaacaaatcgaaagcaagcgttccagccaagtggttggggagcaccgttgtctggcactaggaaaggaagtgcttcttgaaagtgttctcttaaaaatgattttccagacttattttattgcattttaatcacaaagtgaaacttaaagcaaagaaacaggacattcccgctaccgaacagaacctatcgtctattgcaggaatgactgctacttggaccacagacctttagaaaaaacagagaggcaaatgattaggctaatttaacgcggagatctgcttagcagaaaagacacccaaagtagcatctgtcagaggaaaacatcttttgcttccacacaaggcactcgatttggtttccaaccttgagtcctcaacattcaactttcaagtgcaacaatgttggaggcacaagagaatagtagattacctacaagtgaacacaattgtacggaaaagagacttacataagttacaatggcaccctatgtgagatatctactttaacaaatatgtagagcaatattttgcccaataaagtcaatcatttgttacatttttgaataagtaaattatcacatgaagatttagaaaaatgttaccctgaaacattaaacgatagttttgccatattacaaaatagctattttaaacttttgtataaggcatttgaagccaaatggctgatatgactgttctcttcagctggaacattttttttcttctcaagaagggtgtgtgtgaatgatgtgtgtgcatactggaggtagttgagaagaatttgattaatacataagacttttcactaatgtctcccctctaatccaaatttactttttaaattaattcacttggatttaaaaacagaaatgagataataaaccacaaattacacattataaaaattagtttctccaatgtatatgatttttggaagagtgcattttcaaggtgagaatttttgatgtgtctgataatctgccagatatgagaggaatgtcacaataaaattggttttgccatgatatgaa

SEQ ID NO: 758 - DNA, 3822 bp, Homo Sapiens
ggaaagccaggcttgcatgaaggaaatgatttcctatgattctgcttactgcttaaaaaaattaatcaagttttctgcctgacaagatccagtatctgccggaggagccccaccttctgctactattatgttcttcagatgagtagaagagagtggggagggagagagcaggaagaagaaaggaagaataatgtcttgaaattgatgatgcatatcataaattattactcaccccatgttcccaccctcgagagacctccaaacaatcaccatgccacagtgaacattcagtaacaaaaattcagccagggttttcaccagcatgaatggcagtgattccaatcaggaaaacagaaagaggagagttcagagccacctagaatggctcttgcaagatacgaaatcaaggcagcagcaacagggctgaacattcctcatccctaactctcccttcaccagtaggaaacccaggataactgcaatcaccgcaggcccatctggcctgaagttctactactagtagccctccatgggaccttcttaaggaagcatgtcaactcaggtaagggatgtaaggggatggatgaccctttgaggccaaagttggagcaaaaaacaccagatgttcctgtgcactgctcctaagagatggttctgaagaccagttcggggagaggtcaaaatactggacagaatctcagcaacatggaacctcaaactaagtgacagtcacagacaactcttccccaaagaaaataagcacagacatggtttgtggtaagcagaattataaagatgaattcccatctccctgtcagattaccagtatggtaaattaccagattacctggttatttattcaaacactaatacagttattgccttgatggaaacatacagatacaattaaaatcccaagtaccaaataaattgaccttaagacaaagactaagtaaatcacatgagccctctacaagcagagagtttttctccagctggtagcagaagccagagatttgaagcataggaagtattcaacacattattgctggcctgaaaatggaaggggccacataacgagggaaaccggtggcctctagaagcagggagcagtcccctgctgacagacagcaagccaagacctcagttctacaattgcaagacactcaattctgctaaggacaaaaatgagcttggaagtgaactctgagcttcaggtgagaacacggccaaacaacaccttgatttcagcttaaacaaagaatgcagccactccatgccagaattctgacctgtagaaatttgagctaataaatagatgttttaatagcttcatcgatacatacttcacttactgtaaaattcattattttaaagtgtacaattcagtggttttcagtatatccacaaaatgcaaccatcaccactatctgatttcaggatttctttttcttttcttttttttttaatcccataaagaaaatccaaaccaattagcagtctttcttccttctccctgctcccagcccgtgaaaaccactaaattactgtctgtttccatggatatgcctattctggatattttatataaaccaaatcatgcaatatgtggccttttgtatttggctgcttgcacttagcataatgttttcaaaatccatccatgttgtagcatttctcagtatttcattccttgtatagctgaataatataccacacaaatatatcacattttgtttgtccattcatcatttaatagatgcttaggtttttccattttttaagtattataaataatatggcttttaatatttgtgtacaagtttttctgtaggcacaggttttcatttctcatggatataaacctagagtgaaattgctgggtcaaatagtggctctatgtttaacaatttgaggaacagccaaactgttttttgaaatggctgcattattttacaattctgtcaacaatgtatgagggttccaatttcctgacgtccttgtcaacacttgttaatgtctgcttttgtattttaggcaccctagtgggtatgtcataatattgcattgtgattttgatttgcatttccctaatggctaatgttgtacatcttttatatgtgcttattggccatttgtttatgttctttagagaaatgttctgttcaaacactttgcccaagttttaactggactaattatctttttattgttgcgctgcaagaattctacatgtattctggagtagttgtttatccgaaatacaatttgcaaatattttctgtcactgtataggttgtctttttactttcttgatagtgttctttgaagcaaaaaagtttttttattttcttgaaccccagttgatctattgtttcttctttttctgcttgtactttcggttttatagctaagaagccattgcttaaatcaagttcacaaagatttacacctctgttttcttctaagagatttacagctttctttttttttttttttttcttttttgctagagaaaggatctcactgttggccaggctgttctcaaactcctgggctcaaatgatcctcttgcctcagcctcccaaagtgctgggattacaggcatgagccaccacgcccatccaagttttacagctttagatgttgcatttagatctttgatccattttgacttaatttttatatatggtgtgagatagaggttcggctttattcttttgcctgtagatatccagttgtttcaagccacagtgagataccacttcacacctactaggatggctacaataaaaaaaagacaataacaaatattgatgagaatttggagaaatttgaatccttcaatttgctaataagatgtaaattagaggaaccactttagaaaacattttggcagctcctcaaaatgggtatatacctgtaattttatgtttaaaacataactgtaattttatgtttaaaattactgtttgactcaacaattccactcctaggtatataccaaagagaaatgtaaacaaaggtttacacagaaacttgtataaaaatgttaatagcagcattatttataatagccaaaaagtggaaacaagctaaatattcttcgactgacgaatggataaagaaaatgtggtatatctatatgatggactatcactctaccattcaaagaaacaaaatactgaatcatgctacagtatggatgaatttaaaaacattatgctaagtgaaagaagccagacacaaaagtccacatattgtgtgattccatttatatgaaatgttcagaaaaggcaaatctatagagacagaaagcaaattcgtgattgcctagcgtggggtgcagaaaaaagtggggattggagggtgataactcaggggtgcagggtttctttggggggtgatgaaaatgttctaaaattaattatggtgattatggttacacagcgttatgaatatactaaagaccattaaattatatacttaaaatgattgtattatgtggtatatgaattataattcaatagaatagtagtaaaaaaacaggtgatggaaagcatttgcctgcagtctatactttttctactcctggtataggagaacaagaacaaagaagtcactcagattgttttaattgcctttgtactaaggagaaaaataagacctatgtcaggcacatgggtagatggttcctcataaaggcttaagacaaaacccaagtaaataaaaatgagtttgtatttttctgatgaacttttttgtatatgttttatgtgaactcatgtgaggcagaggcagagagtcactatacatgatttc

SEQ ID NO: 759 - DNA, 5314 bp, Homo Sapiens
cttttgtgcaggcatctcgctgtctgcgctgggcacggagcggcgcgcgcgcgcccgtctttccctcggcggcccccgcggctcggacccgggccggcagacaggccatccatcatccgccctcctcccgcggagcgccgcagccgccgcggccaatccggcggcaggtggggccgcacctgcgcgacagcccgccgcttccctccgctcccttcgccgcgcctcgcgtgctagcggtgcccttgtgagccactgcgttctccaaggccagaacgggacagatggagaaattgagatgagagctcatccacaagattacccatcaatgagcaccaatagcaaccaaatccactagaagactgggagcttttaagtcaagaaacttacatcagtatcatcattccaagaagcggtatccaagctgttttatcgaaagtgcgcatgggagatggtgctgtgagtggggagtgagtcaaaaactccgctggggtgtacaaaagtctactcaaatgtccacagcatctgtgggggatggagaatagttggaggatctttctccagaatccttctgttctgtagtacaagtattactcattatagactagcacgaaaaatcaagtgaaatgcgaacttaagagtttaaaaagaataaatggtgcttttctggcctattagtaataaattaaataaaaataattttaatttgtaagtaatgaatgctaatctacattgtattaattgggcttaaccagagagtttttgtttacatacattaggcaaacaaacaataggaatgaggatttttaataaagaaggaagccagaaacacacacacacaagcacacacacacacacacacacacacacacacacacacaccaagtaagagaatactaaaagatcagagaaaatgtaattatacttatcaaaatgttttaatgcagtggcctattagtttcagaatataaaatttatttgatttgttgagcaacttggagcttattttttaatcctttcagataataggaacttgaaacatacttggctgtgtataagatatatgtgatattagaaaatcatatatatctgttaatatatattcaaatatattactaagcaaaaatatatttacatgtttatatcaatgatgcaattaataaatgttttcacatcctgtgtctcaatttatccttacataaaacaagtgagttacttattctttaacttctctaggcaaatttcaaatattttctgaatataactacagaatgcttggtttgtgtctctatgaaaggtcttaacacactcctgcaatgaattatatgcatatggctctcccatactgggaatgcctagaggagagaaactgtcttcttaccatatttgtatctatggttcatgcctgctccacatagacccctaggtttcactagagagatctcaagacagtaggtttgaagtaagagaatgggaggatttagaggcatctcgactatactgatatactctgcaatcagcttggcatctgggaaatgttttgctgtctgcttcatctccagtgccttgaacagtacatgtttctctggagcccctgcaaggtttgttgaaggagggcatacatcaggtattccataatttagcaacattccataatgtggctgctagtaaatggttggttcaggatttgaacccaggtcctctgtgtcatgttctaaatgttgggagaataaatccctcccttgtctcagtgaagatttctaagctgccctgggttgttgtgtataggtgtttagcttatgggatgggactggaaggtggtgtagggacacaaaaggaattaaaccatgtaagttcaccttggttggcattttcatttctcctttggatatcaagcctgaacaatgattctcaaagatatgtattaaattcaataaggatttactactactgctcacctattaagtgcgaggaacagttgcacttagtaggaataaagaggtagctggcacaaactattctgcctgttttttgtttttgtttttcgtttgtttgcttgtttgttttttcgacagagtcttgctctgtcgccaggctggagtgcagtggcgcgattttggttcattgcaacctccacttcctgggttcaagagattctcctgcctcagccttccaagcagttgggactacaggcgtgcaccaccatgcccagctagtttttgtatttttagtagagacagggtttcaccatgttggccaggatggtctcaatctcttgacctcaggtgatccgcctgcctcggcctccaaaagtgctggtattacaggcgtgagccaccacgcccggcctattctgcctgtttgttgactgcagtcatagtatgttcttgctcctccctgagctacttttgctttgaataaaaccatggtgtcatggaaagaacaaaaagctccagggtagggcacatgttttcaaacttattacaagagggagcctggatgagagtatcttaatataccttttagagctgatgtgtccttctctccttgagatccaattaaatttactttctgtgagttacatgatagaaagtgttacattgtacattttagcaatttcagcttattcagatcaaacaaaaaaaattagttgatttgactatctacagtttatctctgccaccaaagtaaatagcatggacttgaaggtgccatcccaactattgccctgacattccatcacctgcattttccagaaatcaggtgaacgatatttttcagtcttgctgcatttcacctctggagtgtgtagacccagtcttaatgtgcctaaaccaaatgagatgtgttatcccttccaatggaactaagcactttaagtaactaaggaattggagagagagagagagagagagagagagagagagttttctaaattcagcaagaaaaaataaggtagtcgagttgtgtttcaaaccacttctataattgggagctaaacaaatttgtggagaaagtacttggtcaactgtataatttcttctactattaactatccaaaacaaacaattaattaaaaactaaacacagataatgaagactatctattttctaaaactgtgaactttggaaaggggcgtgctttatggatatctgtaagtccatatttggacaactatcagtttaacttttagtaatctaaaatgctcaacttaaacttcatttcccacttctgccaaaaccagaagaatcaaaaatacagtgaaggggcatgagatttccagctcacatttccaatctccagaggtttgaaaaacttcatctatctatttgaatgccatggttgtgatccaaactgaatttgaactttagatacttaagagtgacccatcactgtttaaaagtccaaagtggccacagagaaccctacggaccattacttcattgtttattcttgtaaattataaatatttttaaaaattccaaattatgaagttcgaaggggatattttatatctctcagccactgtcattttcttcctcccttccttgggtgttggccatgtatctatgagtccagttggtaaaacaatcagtagcattgacaggatgatgtactctggtccgaaactacatttctcagctttttcagttctcaggagacagcggaaaatgtacttagcaaactctattataaaggtccatgttgttccaaatatttagttgtacttaaagtaaaatcatgacttcagatgccaagtgaaataaagcataattttcacactgtatgatggaaagactatttatcatatacatgtctttctcttaggatattattgtgacagtatagcaatataatggtttataattacatatatacacacaatatattttatagtgtaactgcatcattgttctggacaggggtgagatatgaaagtcctaaaagcaaatattgagactattaagttatcagagtctaaactgtgggagtagaagagaaacagaaagaagaaatggaactgtgagatatttcaaagggaaaagacactatatgcatgaagcaaccactattatttattctacaaataagtattcttgccattactttacagataaggaccgtgaggctcaataattagcaaataatggagcatgactcaattctgtaggtatatttgacttaaaaaaatgcatcctactttttcatattcagttcaaaagattaatgatgggacaaagaacaaagaagaatttggtaccaccaactgagggctggtctggtgtggtagttggtagctataataagttagtacaaacatgttctgctcatgctacaagaagccaactggtggagacatcaagaacacagtcagaaataaatatagcaatttaatttaggagagagctgggagctatagattgagcctctacatttaattggtagctaaagtaatgagaactgtatgaaggagaattagagataaaaacttctcaataaaaatagtggtaagaagaagaaatgagaaaacaatcttgaggattgtcaacaccatgaaagtcttagttgtttgattattgttttaatagtagagatggggacattttatgtgtcaaagcagtggtccaaatgagttccgcatctcaagagttttgtagagtgttaatgggtgttactcaaagggaaaaaaaggataaagttataaaccatttaggagaccctaataaaactaaagtgaatgaggttctttactatctttaattggctatatttgtcttacaaatatccaaaatggtgacatggtatatcatagttcctaagattatttgactacagagtccagatttcttggagaatcatctagtggtacaattaattgggagaaaagagccaatgaagagggaaacttggaatgtcagagatggcaggatacccctgatggatcttctgaggggacagcaagggaagaaattaagaaatcagaaagggaggtcttgaggatgagaggtagggccttcagttagaaatcactacatgggccaggaacggtggctcacgcctgtcatcccagcactttaggaggctgaggtgggtggatcacctgaggtcaggagtttgagaccagcctggccaacatgatgagacctcatctctactaaaaatataaaaattagctgggcatggtgtcaggtgcctttaatcccagctacttgggaggctgaggcaagagaattgcttgaacccaggaggtggaggttgcagtgagtcgagattgcaccactgcactccagcctgagcaacaagagagaaacttct

SEQ ID NO: 760 - DNA, 14167 bp, Homo Sapiens
agtgctgctggtgccggagtccggaagctgacggcgttgcctaggctggattgcagcggtgcgatcaggactcattgcatcctcaacctccccgactcaagcagtcctcccacctcagcctcctgagtagcaaggctacaggaaaaacaaataatcctcagcactgaagttcaaagccatggttcctgcgtgttccttaacatgacacaggtgggccttcattgaaaacaccttcagctcctccagctcaattctcatgaaaacaaacagcggtgccctttgcccaaggtggaagaggtggccgtgaaatcctcatcagcttcctgtatattgcagaacctcaatcaggccgtgctgcaggggtgaggacctggtcgtccacctggagctcaccaggggaaataggggcagtgtcccgcaggcagtgaactggcacagcacccctgcccctgaccctcgccattgccattgtgatgggggaggggtcagggcccctctgcacagtccaagccacagcaaaatctgggaagtctcctggtctttgcccaggaaacagccttcctagacaggctctgaattattcacctcttccccttcatattacaactgccactcagacgtgaaggtgcagcacaaagcttcagaaacaatggaagaaactgaaatcaggatcctgactcctgcatgggaaagctatagctgtgtgactttgtgcaaatcacacacctgttctgtgtcttgcgtctgcatctgtgaaatgcaggtgaacctagcacttacctttgagggctccttggagaattaaatgaattaattcatacaaaggacttagagagatgtccggcactgagtaaacactcagtgctagctgttatgatgatgattaaagataatcaaagcttgtgctttttaatagacaattttttttggaacagttctagattcactacaaacttgagaggaaggtacagtgatttttcatagcctccctacctccccccatcatcaacatcccccaccagagtgatatgtttgctacaactgatgaacctacattgacataccatcatcactcaaagttcatagtttacattagggttcactcttggtgctgtgcattctatggatttggacaaatgtataatgccaggtacccacaattatagtatcatacaaaatattttcactgccctgaaaattctccatgcttctcttctttatccctccttccccgtagccgcaagcaactactcatctttacaatctccatagtttcgccttttccagaatgttacatagttggaatcacacagcatgtagcctttcagattagcttctttctcttagtaatatgcacgtatgcctcttccatgtcttttcatggcttgatagctcatttatctttagtactgactaatactctgttgtctggatgtaccacagtttatttattcacatactgaagaacatcttggttgcttccaagttttgccagtcatgaagaaatctgctataaacattgtatgcctgtttttgggtagaaagccttattttttattacattaaacatgtaatatatggagtttacctctgccatttcagagtgcccaacacacagcaggattgttacttggttttcaactcctgactcttttccaaatgtctagtgcagatttctgtgcctaggtgggtaacagtgggaacttctgggacccccagctgttggtctgaccttcattcagtatccttctggtcagtcacatctctcatctttgcatttgactctgctcttaatgccaatgaatctaaaaactcagacatagcttgtccctacatctttagtgagtttgttcatgctttcacaatagtcttgaatttcaggaaaaaaagtatatcattcaatgatggcaacataatgctgcagagtttggttacatagaatattctgatgcatgaaaatgatgtgcaaataaaaaagtgataaagatggtcaaagatatacaggaggcactactgatagaaatgagtttaaatttaggaaaaagggcaaatttacttagggaatagaggtgctagaaatctataatgaaattgccacattactcttgagtatacacagattgaaagactgtgaagtggtgattgcaaatgttcagggttttttaattatactttaagttttagggtacatgtgcacacgtgcaggtttgttacatatgtatacatgtgccatgttggtgtgctgcacccattaactcgtcatttacattaggtatatctcctaattctatccctccccctccccccaccccacaacaggccccagtgtgtgatgttccccttcctgtgtccatgtgtcctcattgttcaattcccatctataagtgagaacatgcagtgttcggttttttgtccttgcgatagtttgctgagaatgatggtttccagtttcatccatgtccctacaaaggacatgaactcatccttttttatggctgcatagtatcccattgtgtatatgtgccacattttcttaatccagtctatcattgttggacatttgggttggttccaagtctttgctattgtgaatagtgccacaataagcatacgtgtgcatgtgtctttatagcagcatgatttataatcctttgggtatatacccagtaatgggatggctgggtcaaatggtatttctagttctagatccctgaggaatcgccacactgacttccacaatggttgaactagtttatagtcccaccaacagtgtaaaagtgttcctatttctccacatcctctccagcacctgttgttccctgactttttaatgatcaccattctaactggtgtgagatggtatctcaatgtggctttgatttgcatttctctgatggccagtgatgatgagcatgttttcatgtcttttggctgcatagatgtcttcttttgtgaagggtctgttcatatcctacacccacttgttgatggggttgtttgtttttttcttataaatttgtttgagttctttgtagattctggatattagccctttgtcagatgagtagattgcacaaattttctcccattctgtaggttgcctgttcactctgatggtagtttcttttgctgttcagaagctctttagtttaattagatcccatttgtcaattttggctttcattgccattgcttttggtgttttagacatgaagtccttgcccatgcctatgtcctgaatgttattgcctaggttttcttctagggtttttatggttttaggtctaacattcaagtctttaatccatcttgaattaatttttgtataaggtgtaaggaagggatccagtttcagctttctacatatggctagccaattttcccagagaccaatgactttcttcacagaattggaaaaaactactttaaagttcatatggaaccaaaaaagagcccttattgccaagtcaatcctaagccaaaagaacaaagctggaggcatcacgctacctggcttcaaactatactacaaggctacagtaaccaaaacagcatggtactggtaccaaaacagagatatagaccaattgaacagaacagagccctcagaaataatgccacatatgtacaactatctgatctttgacaaatctgacaaaaacaagaagtggggaaagcgaatattcagttttgatgaagttgctttaaatgattcgtttggagatgaggctgaatttttaaaaatatccaaacaattttaagcaaaaagagcagaaataaatgcctgaaaattatgtatagaaaaatagaaaaaagtaggacaactttatcacctcaaaccaagagtttaatgagatatataaagctgcattaaaaagctgaaaatttgagaaactgctcacatgatgcaccaaaatttccaggaagaggaaaactagagataagaattttcatttggcacaaattttcctcttgaactacttgttttcaattaaatgatcagttactccctggagtaacaatgatgttagaccccttgaggttgactctagatcattccttgggaaaatggcggtgatcccttctcacatgtgagatgaggccagtcttactggatgggcttcccaacagctttctccttcccttacactgtggccttgggtaggtctcttttgctttaggagctttaatgcctctatctgggcaatgaggaatgaggggatttgaccacatattctttgagggtcttcttcccttttatgagttttcaaacactactgtgcaccatcaatctcaaaacaattacccaagacataattttaaaattattttatttcagtagtttttgagagacaggtggtttctgcttacatggataagttctctagtggtgatttctgagattttagtgcaggcatcacctgagcagtgtacactgtacccaatatgtagtcttttatctctcaccccactcctcaccttccccaccgactcccaaaagtccattatatcactcttatgcctctacattctcatagtttaactcccacttataagtgagaagatatggtatttggttttctattcctgagttacttcacttagaataatggcctccagtttcatccaagttgctgcaaaaggcattattttgttcttttttttatggctgagtagtattccctggtgtacatgtaccacattttattgatccattcattggccattgggcacttaggttggttccatatctttgcaattgcgacttgtgctgctataaatatgcatgcacaggtgtctttttaatataatgacttcttttcttttgggtagatacctagtagtgggattgctggattgaatggtagttctacttttatttccttaaggaatctccatatcattttccatagtggttgtattaatttacattcctaccagcagtgtaaaagtgttcccttttcaccacatcaatcccaacagctatggtttttttgacatcttaattatggccattcttgcaggaataaggtggtatctcattgcggttttaatttgcctttccctgatgattagtgatgttgaacgttttttcatgtttgttggatgttcatatcttcttttgaaaaatgtctatttgtgtcgtttgcccactttttgatgggattattattattattttttctagcttatttgagttccttgtagatttcggatactagtcttttgccaagacatgattttgttagtcacaaagttcctttgccttatttcctccagtcaaggatcatcttaatgatgaactcactaatgcccaagctcaaaagtgacagagaggattctggggaggtacacagagaggcttctgattgtgatcaaaagaggtggcccacatgttgaaaatagcagaaagtttactcatacaataatcccataaattgtaataactcccatcaaaaactgtaaaggttgaactgctcgttatactttcatgcccagccttcagactgccattttctgattgttttacctccacggctgtccttaacatacactgtaaccaatttttactttgaaataatcatataccattgtgtgtgcgtgtgtcctgctatctgtacatctcttgttcaaggcaatgttgaattgtgcttgtttgagtacattaacatttccctctcaaatggacttatttataaagcacaatatgttatgcataggctgaccactttatccctgtcttaaaatgagtgaagtatattgggtgcatggataatgatcacttttaatttttctttttctcctctttatggcagtgtctggcaacattcccctatgattttatattgaatggaataaacatgttgtagggagaaagggaaatttgggatggagggtgatatgagcagttacccactcctttgtgcaaagagaacactatccttgcatcatacattgaacagcagtttaccaatgatgtcaatttattttacaatggcctcaaaatgagtagggattattattcctttgaacatgtgagaaaacagaggccaagaaagttacattaacaggtcaagtatttccaacatatccgtgtatgtaggcatgagcacacactgagtaatttgtcctgaaccaccccttttctaaggaagtccttcctaatgtaatatatcctgaagggcagcttctagggcaaagtaacatgatagtagatggcagtcttccaaggagttactggtttccctaggtctctagttccttgcttatgtgagtattaaggcaaattgagtgggatattgcagcactgggttatcactcacatgctaacttgcgtgggaaaatgtctcccctgcaaagattaattaagaatcagtcctttggaattctgtgctttaaagtgaattactggtggtttctgtgaagttaaagggacagacactgcttttaatggttgttaaatggaaactacagaggagtgtaagtgggcggtacagctgcatttgtaaaaattcaggttgtttttaattaacaccacatgaagcatccagccacagcatattcccccagttcaatgatgtctgtaggtactggaggccagaattcttaaaattgcttccatgttgtgctagatgcagcagtgattgagtactattgctcagggcaattggggtaataggaacctcatcagttagctaaagaggtgtggataggagattggggtaaaaaggtcaaacctggtccaaggctggtttcagagccaggtatccccacctggcagtaaccagggagtaaggatttacccttaacaactcagctggcctcaagccttcaaggcctggaaaaggaaaatgcttctgggttcacatggccaggcaggctggagtctagacacaggagcactgatcattgcttttcctttcacagatgaagaactcaaaaggcacaaggaggttacaccagttgttcaaggcatgggggggtggcccacaatcctgctgctgctgctcttcccttcaggtggatgactcagtcttttccacaaatttaaggtagaaaagggtagtcagttttaatgccatgcagagcagactcactttgcatttatcattgaaaagtaggaggtcaaagaattgacagtagttgaataatcattatacaggcagtcaagcctcactgatttgaatcagtggagtgggactggtctgattataaagatttacaagaaatgcatctcaataaatttaggatgcaattagggtcagataagtatgagataagtgtaggtaaaaaagcatactaagtgagtgtaaaaagtcctccatgctttaaagtttttttttttttttttttttttaactaggtcaagcacaacccatgctagctagtttacactattaatttacttctcaggtagctattgcaaagataaatgtaagcctggattttgcccaacttttcagaaatttggactaggggaatctggaccaggcttgaaatggtgtatgataaaagcaggatttcattagagtgggtcaaaaactagggctctgaaataaagataggcatatgaaattcaattcaaaaatatttaatgacatctactatgtgaaaagcacagggcaaggctgtaaggggtatagagatgaagcatatatagaaagcaacttatacagagtggatataaccctcacatatgcaactgtggttaatgtgcatggtaagaatgggagactgggatgacctgactagccttgggtgcctaaggagatgatggggagccagggaaagtttttgattaggggaacaacatgaccagagctgtggttttctttctgaatattttaagttccagggtacatgtgcagaatgtgcaggtttgttacataggtatacacatgccatggtggtttcctgcacccatcaacccatcatctacattaggtatttctcctaatgctatccctcccctagccccccacccctaaacaggccccagtgtgtgatgttcccctccctgtgtccatgtgttctcattgttcagctcctacttatgagtgagaacatgcggtgtttggttttctgttcttgtgttagtttgctgagaatgatggtttccagcttcatccatgtccctgcaaaggacatgaactcatcctttttatggctgcatagtattccatggtgtatatgtgtcacattttctttatccagtctattattgatgggcatttgtgtggttccaagtctttgccattgtgaacagtgccacagtaaacatgtgtgcatgtgtctttatagtagaatgatttataatcctttgggtatatacccagtaatgggattgctgggtcaaatggtatttctagttctagatccttgagaaatcatcacactgtcttccacaatggttgaactaatttacactcccaccgacagtgtaaaagtgttcctatttctccacatcctctccagcatctgttgtttcctgacttttttttttcttttctttgagatggagttttgctcagttgctcaggctggagtgcagtggcgagatctcggttcactgcaagctctgcctcccaggttcacaccattctcctgcctcggcctcccgagtagctgggtatacaggcgcccgccaccatgcccagctattttttttttttttttgtatttttagtagagacggggtttcactgtgttagccaggatagtctcaatctcctgaccttgtgcattctgcctgccttggcctcccaaagtgctgggattacaggcgtgagccaccacacccggccctcctgactttttaatgatcaccattctaactggcgtgagatggtatctcattgtggttttgacttgtgtttccctaatgaccagtgatgatgagctttttttcatctttgttggctgcatacagaatgggagaaaatttttgcaatctatccatctgacaaagggctaatatccagaatctacaaagaacttaaacaaatttacaagaagaaaacaaccccatcaaaaagtaggtgaaggatataaagagacacttctcaaagaagacatttacacagccagagctgtgttttaagagcagtcacagatgtgagaatctgaacaggcggttaaggaattgctgcattgtttgaatgaaaagcctggtccaagaattataagccatggaagttaactggatgtgaagaaaggaaaaggcctcaaaagaggccctgagactttcagcctgggagatttggcatgatgataagggtcggtcatgtaaccagggaggggactgcattgaagacagttttggctttggacatttgactgtgatccccgtgggttgcacagttggagacatgcagtgcacttggtatatggtcttgactttgatgaagctggatctaaattacaaatttgagaatcagctgcacagaggtaagatatgaatgtgggaattagaggtagagagtgaataaaagcaaagagctggggtctgaacagtgggtaattaatcctatgtttagaaagtggtacatgtggtctgtttattctctgtacctctaactctgactgaggataaaaaagggaccagtgagtttttctgcaacgagttatacgattacgtggtgcagtcaatgactacatttcctctatgctgacagattatctttaaattacaataaaaatgatcctatggtcattcccagtttttgcttttcttttctctgtctgtgctaaatgcactttgggctcttgatttactgttagaaatttcctgtgtagtttggggccgagagtcagggggtcaggttttgggatttgaaacccaaacaaatctttccctgcttcctacagtactctcaaattaatttaggggtcagaggatatcctgtgaaaatatcaagaggaacctagacttttgtttctgcggggatctgaaagaaacgcacatttgaagaaacgcatgaagttcattccagggtagtcaaattctactaatgactgagaacatttatgtaccaactatcagaatcaatttctgaaataaatatgtgaaaagataagcatgcttaactttactgaagaagttacagaagatgagatgcagtacaggaaatccaagaacccagatcaaacattaaaacataaacaaaataagaaaattttattttggcccatccaatttaactaatgtttaccaagtgcctactacactttttgtgctttgaccacaaaaaacataaagcgttaccagaatgtggatgggtactctacaaaattagtcatgatttctgttctcagggagtacactaatgtgtgaacttatatataaataacaacaatagcaaagacaacaataaaccaactgtaatgcaatgtaaagtgaaatcagtggtgagctgagtcaaagaagcacagagtatgaggggtgataccattagttctgactagaggatcaagaaggttttctcgggagaggtggcctttgagcgacatccttgaggatagtaatggcaagcacagtagtaggtggtggtggtgacgatgatgatgatggtgaaaagagcagctgccaatcactaaattcttatgatttacctagctctatattgtttgctgaagaacttctatgttattaatattttaactggtaaagcacaggaaggggatttcagataataaaaagaatggaataaacatgtttgtgtgttggtaggtgtagaacggagagtcatttggtgtgttcaaggtccactgtgcatggtgggttgtagtacaaaataagattgaaagaggagtaggaaccagagcagcaaaaagctgccaatgctttatgaattacacaagtcatacgtagagctctctggttacttgtgtggaaagttgaccccactgagctaagcaggatgggcttgtggtgtgtgcatctgtcctctcaaaccgaatgaaatgctctctggcattgcataatcagcagcaaatcttcctcctcaaggcttatgaagaaaagaccttgaacccagtcttctggtggctctagtaaagacagatttggtgacggcctagaagatttcattaacaaaggatggccaatacattacaatcaaagaaaaagctgggcattgctttctcagatgatatggttcttttccactttaattcacatgattcctaaagcatctggctttcctctattttattttaggaattccatatataactaaaataacctacaagcacctcgacattttgctaacaaaaaaaatactttttattatttttgaaatcaactgattccacagtttaaaacacagtggggaaaaaaaagcctattcatgctgtaggtgtctttatgggaaaaaattcagagaattctgatagctctgaaagagataggaaaacagaaaaataatgaccccagggaaagatattatatttttaaaacaagttgaaatatcttcaagatactaattgtggtctctttctttaaagtatgtggtcatttggggaatagggagggaatgcatgtgtgtggcgggagggtttaatcagcttgataaagctcctcggtttattccagttgggctgagtccagttgagattaggaaggaacagaaaggtttctctatagaacaattagtggggtatgaggaatattcagttgtggtttttagttttcataaatctcaagcaaaatgaagaaataacaatgacaaaataaatacaaccaaacattcaaagactcatatctgcatttttacaagattttggagacagcaaaatcatatttgggactcacttctctggaccctgatatacagtatgcttgctctcaaatgtagaattcagatttcttccaaggtccctgggcattctaggagcaaaggcacattcagatgcagggaccagaccagtttcctaagtttccatgcatccatgagttttggtttatagtgaaaaatgttatctttaaaattccagacatttctaggcaagctgttagcatgaaagttgctgtttcttccctttcgaattcaccttgaagcaagcaacagaatatgcagaaaagaggaaaagaaatctttatcaacatgagtgaatagtaaagggtgtcatccacatgctggacagttgggtatttggttagatgtaatgcaaccagtatatagtggaatgagcaaactgttgtaaaaatactgaaatacttttatactggttgtcatacaggtacttcctggagtgtcttgagtgctctcatgctgtccttgatatccaggtggttacctcctttggaaacccttgagtctccccatggaccagcaaatgacaagataatgcttggcagagtatagtgatatctagagtctgacttcagtattacagttaatgttcattctaattgtccgagctgttaaattatagtttaaatgtcagcactcttgatttgacagctgagatggtgtatgagggaagtattattgttatttagtgtttatcttcccaaaacaatatctgcttctttgtgagaactgctttctgcctacatcaaatatgaagttctgatgggggatgacaaatagctcattattcctttggctacagtaattggttggttcagggatggccctttaactcaagccaggccaataaaataatttgttggtgtatttgttattttttaacaggagctgccactgttaggttacaaaatagaggatactggaattctccacaacaatgatcctaccacatgaaggaatttgtctaaaaataaataaataagtaaaggtatacaccaggagaagcagagttagagattccagggaagtcctcagaatgctgagtacctgggtctagttgtttatacagatcccattctgtccccatcctttctgatcctgttatagtttgatttggatatttgttactttcaataaaaaagtctttacataagaagtaaatgagagggaatcctaggagaccccctgtgaatactccaggtggagagggcactggcctccatagagaggcaacatttgttccccatgagcaatgcaaggaagcacagagcatagttcctggtggaagtggtcacacctacccaagacatggacatgggtcctgtgtcccccatctgtgctgagatggagctttcagctgtaactcagatatgacgtcttctgcttcctgactccatatgctaggtatttgggttggtaatctattgtggggttgtgtgggcttttttttttcctgctttaatatctttaatctgtgtggagtttcttctattagtttctgccagaaagatgcagaccaggttttcacaaatcccaacttaaatcctgaatatggagccaatgtcagataacattgtcaaccttattgtgtgctgggtgctgtaatttgcatgcattgcctcatttaatccatgtaaggattttatgaggtagtactgatattccgactattttacagatggagaaacaggtgaggaaaggccacagagctaaaaagtgctggagtcataactggaaccccagctatctgaccccttatttgtattgttacactatgaataaagtttttaaaatatatatatttttaatagagagtagccccaagaaagcactaaacttctggagcttaattttcggggaagcctccattctaaccttgtccattctgttgcattccccgtgagcatccttaatctagtttgagctgggtttttggctattttcaactttcaaccccaaagtgcttggctaaatagagaatggaaggagactttgaaggcttgcatgaatacttaaggcagagaggtgaacaccagctgcaaggcaaaagaagggagatttcttcctgcgagcggctaggcgaggcaagatggcagacctctgagggccttctgcctgtcaggaggtggctgaaataccctgacagctcagaactgtttgcttgaagtaacttcactgtacgaaaataagaacatttgagaaagtatttgatgagtattccaaactcagtaggggagtagaagcagtgaagtaatgggagcaaattatgtatacatgtgttaaaacattacattatatcccataaataggtgccgttgttatgtgtcaattattaaaagaaaaaaaaaaaacca

SEQ ID NO: 761 - DNA, 1711 bp, Homo Sapiens
ctggcctctgtgtgcatgtatgtgtgtttgcatctgtaggtattatttgggattttctatgcataggatcacaccatctgcaaattgagatcattttgttttctgttcaaaaatactttttctcatgtttatttttaaaagataatttggccaggtgtagaattgtaggtgacagtttttctttttttaagttctttattgcaaacttcttgtttgtatgtgaaatcttatgccatccttatatttagtgctctgtatgtaacatgttctttccctttttattccttttaggatttcctttttatcactggttttgatggatttgattaaggcgttccttggtgaagttttcttcatgtttcttgttcttagaataatcatatttctgtaatatttgaagtttatggtttccatggagcttctaaatctttcatccagtatgttttaaatatctttgtctctcttctccactacacgcccttcagggattccatttagccctatactggggcgtttaaagttttgatgccgatggtgtttttatgttttcaagtcatttgttactgtgtgtttcatttatgttagtttcaacttctattccttctagttcaataatcttctcttctgcaatgtttaatccactgccttcttccatttcagactgtaaatcatactttttatctacagaatttgatatttaaaaaatcttcaacctccccatttaattaaaatacaattatactaactgctgtaatgtccttttcttctatttccaacatgtctgtcaatttcaactagattattagattcttcattatgtgtcatgttttcctgcttctttggctgcttgatattcttttatttttatttattttttttgcggggggatagagttttgctctcgttgcccaggctggagtgcaatggtgtgatctcagctcactgcaacctccacctcccaggtacacaagcgattctcctgtctcagcctcccaagtagctcagattacaggcatgcaccatcatgcctggctaatttttttgtatttagtagagatggggtttcaccatgttagtcaggctggtcgtgaactcctgacctcaggtgatccatctggctgcttgatattctaagatttgatgctggaactttggtgtcaatgctcaaaatgcccaaagacaccactcaacctcagtgtctatgcacacccaagcttttgcagcaggacaggtagagcagagatgaatgtgctacaacatgctggtagagggtaccaccaattgtgcttggggatttcctattcctcatggaaaaatgtgtcttccttaatttttcccataagaaccaccctacttcatgccctgtctctctgtccaaacaccaggacagtcctctcaccagtctcaaccacccaatggattgacaaaggtgcaaatatgattcagtggagaaggcattctcttgtcaacaaattgtttagaaacaacttttttttacacaatttgtttttttttatccccaaaggaaaaaaattcacctgaacctcaatactaactcaaaaactaactcaaaatggattatgcaactaaatataaactataaaactagaaaaagtatagcagaaaatataagacaaaatcttcatgacacagagttaggcaaagtgttctttattatcaataaacacaaaccattaaagaaaacattgat

SEQ ID NO: 762 - DNA, 2398 bp, Homo Sapiens
gtgcccgtcttccctgcgacggttttggggtggaacaggagtggctcctcagggggaaatgaaaggaactgaggagctccagtcgtgagaaggccaatgaagcaggcaccgccagttgggaaatggacctccttggatgctgcattgttttctctggcccagctcctgcttggggcctgatgtacaccctggatggtggctacaggtggggcaccctgtgctgctctgcatctccatccagtcccccatctccacccaaaacagctcagttccccagagaagctccctggaaaccgggaggctgacttcttcaccaactgcagaaccacctgaggccacctggcagaatgcgatccaggactgcacgtggcattccgctgccgtgtctcagtgggatccttccatccagaacggctcctccgtctttctcctcctctcataattttgacagttttaaagcatccaggctatttttgtctttcataaccttgacactcttgaagagtactggccaattattttgtagaatgtcctccaacttgagtttgtctagtgctttctcacaatgagaatgaggttttgtgtttttggtgagaacaccacagaagcaggttatacccttccccatgcattatatcaggaggcacatgtgatattgctgcatcccattactggagacgttaactttgagagatgatgtagcaaagatttctccattgtaaaatcctatttttccttctgaacttaatgagtatcttacaaggagctgtcttggagactatgtaaatatcttgtttatcatcatactttcaccaaccaattttggcattcattggtgattcttgtctgcaatattaattaccactgtgttttccaacagatgatttttctactttcataattccttctccatttattaattgtaattcagtggtaaggaagagctgtcccttctctcccaattacttatgcaattatttcagtatagactcatggatatttagtttattctaccagtgataatccatgaccaacatcatttgtatcattgttccaactgtcccaggtatggccaatgtaagcatcttcaagtcaccccttgtgtttgtttgaaatgcccttattctattttgagcacttcctttctgacataagatgttccaggattattttataatttcactgaccccaccctgtacttaatcatttctccaaagaactctgcttcctttattgagggaatgtatttagaatctaagatctgggtgctggatgtcctcattgttactgaggtgtcactgtgtctagggcctctcagcagacagagctagggaatatgggttaccaactctgaaactattttatgggtattctgagattgagcaaataagtaaatacattgtatttagtgggagggaggcatctcactgtcaaagagagaactacaaataaaaagggaagggcaaagtgaaccctattgtgttagattagaatcagaggcatcagcatgagctcctgatttttagtgtatgtacagattgacagatatagaaataaatatgacctggcaattccattcctaggcatatacctagcagaaatccatggtcataaaaaaaaacatggacaagaatgatcatgctgggagtggtggctcacgcctgtaatcccaacactttgggaggctgaggcaagcagattgcttgagtccaggagtttgagaccagcctgggcaacatggcgaaaccctgtctccactaaaaatacaaaaattagctgggtgtggtggtgcatgcctgtagttccagctacttgagaggctgaggtaggaggatggcttgagcctgggagtcagagactgaagggagccaagattgtaccactgcactccaacctggggaacagagtgagaccctgaagaaagaaagagagaaagagagaaagagaaaagaaagaagaaagaaaggaagaaagaaagaaagaaagaaagagaaagaaagaaaaaaagagagaaagaggaagaaaaaaaaagaatgatcataggatcatagctgcactattatcatagtcctaagctgtaaaccacgcaaattcccgttgacaccagactaaagaatgaatgaccgaccactacatgcaacattatggatgaaaatacaattgcggaaagacattttctcaaaaaatgctgtgtgataccatttatataaagcacaaaccaggcaaattaatccatgtcacaagaactcagtatcaattttctgcaagagaaacgagggggtttctgagctgctggtagtgttctgtcatttggtctgggtgctggttgcattggtgtgtctaattcttaaaatgtatatacattattcatcagtaaaaagttttttaaaatattcat

SEQ ID NO: 763 - DNA, 4521 bp, Homo Sapiens
cgcccacagacgtgcggcttgggtgcaaatcctgtttctctgggcagaggccacgcggggacggaggaggcagagaggacgggctgtgatggagaaacgggagaggagccggccaggcgccaccgtcaccaccatcaccaaccaccaccaccatcaccatcactgactgtcgcccatcccagctcccctgcctcacctcccatctcatatccctgtgcagtgccaactttatcagatcatctctttttcactgggtactactttggaaaagcgacagagtgcgccaagtcaggaataagtacatccgctgtgggacatttatcttcccctttctatttagctacctcaattttctcatcaggaaagggggcacaatggcatttcattcctctaaatcacactgagatggctgggttgcttccagtttttccagtcctggcactggacggttatacatgcttggtgatgatgatgataaagtaatgtcttcattaaattggacagttgggagttttcagacttactcttctttgacttctgagtgtcagtataccagtagcaaatagaaacataaggaaagtgaaactttggctaacataataccaagaatagatgcaaaacaggcacttttgtagggacatcacccaagagacctgcaggcaatggtattcatctgcagtgtagaaagcaccccatcagtgccaagtggctgtgggagctcctcaatctggatgcacagtttcccgtggggttttcaccctacctaaagaatgctttaattgctgtttttcaaaattgtctttcaccaggccccagggacggctgaccattcagaacaaacacagggacagagccccagggctgttgggaagcccagcaccagagggcatgaaccttcttaggagaagtaaaacttacaaaaaacaagctcttaaaccctccgccttttcccctattggttagaaagtgaatcttaaactgtgttttatgttctagtctaataaaagacagctagacaagcctacgtttcttgacatgcttggaaaatcatcttcccgaaaagtcatgcagcagggctttttttttttttttttcgactgagtctcactctgcctctcaggctggagtggagtggcatgatctcagctcagtgcaacctctgcctcccgggttcaagtgattctcctgcctcagcctcccgagtagctgggattacaggcgtgggccaccatgcttggctaatttttgtatttttagtagagacagggttttaccatgttggccaggctggtctcgaactcctaacctcaggtgatccgcccgcctcggcctcccgaagagttgggattacaggcgtaagccaccacgcccagccagggctcctttttaatagggctatggagtcccccacctggtggtttttttgccctgtgccctgtttttacaattcaagaaggaaagtgatcatattaaaaataatgtgaacccagctgagctgcatttgtcgttaccatagtttaagatttctcaaatgttgaagtataattatatgtcattaactcaaacctctctaatttgtgaagtagggttttaaatagggtatgtaattctgtggagaatgactccgaaatcattctgaggacctgaagtttaagtaaggcatagtcagtctaaaacaatgacattgtcagaacgaagacttaaagaattatttagctatgtttttaattctggatctttaggaaataattagcatctcaaggaagcttcatgccaatgatagtgtcttagtcttttgggtctgctatcacaaaatgccttagactgggtgattctgaacaagagaaaggtattgctcacagttcttgagtctggcaagtcgtggatccaggtgctgtggattcagtgtctggtgagggctagctctctgcttcatagatggcaccttctatgtgtcctcacatggtacatggggcacacaggctcccttgggcctcttttataagggcactaatcccattcatgacatggggcgttcagaagctaatctcctaaagtcccacctcttgatactgttgccttggggattaggtttcaacgtatgaatctgtggggacaccaacattcagactgtgacaggttggcattgagtaccaagttatatccaacacgcattgttttagcccatacaaattgttatagcctatactaattctatgttaatttaggaacaattcatttgcttttgttgagatatgatttacatacataaaatgcacaactcttcagtggacagcttgatgaatttttgcctatgtgccccctgcaataagatacagcctatttccacaggcctaagggatcccctgatgccctttctagtcagtacccccccaacagagccactatcccttcaatggagccactattggacttctatcaacatagaaaaataatttcttttaaaataatttctaagtaatttattttgcacttcactccattaaatgcaattggcctattccttaaatgcatttggcctattccatttatgaccaaatctgggggccctgagcccagtgctgtgtagacatgagactgtgtagacctgagacatggtattattaatacataaggcaaaaacttccacaagcagaagcaataccctgtatgcagatacagagggttaggggaacccacaagagtctgggtctaacccagttttgttttgtttgtggggggaaagggaaggctttttggaggatgtgaattttaagttgaaaatggaaaactgagtagaagtgatccagctaaaacgtggtaggaggaaaatgaaagcctattctaggtggaaggaacatcttgaattccagcctcagaaataagacagcatggagtgtttgaagagcaaagctaagctgaagatgcttggagtatagggctgtgggagaaaagtgggaaataatgctggaaaggccatagggaccctttcagtttgacacaaaggccctgctgaggggtggggcttggctgtaagagctaggagagctctaggacaggcttgcgtggtgggcatggcaggaggagacttgaggactcagcaggcggccttagggtcgggagattacaggaggcgcaggtggggggccaagtggtcattcaggtaagagacagtggtgacctggactatgcagtggcaacaggaatggggagaaatgaatgaaatggaaagagaattacaaggtaaaatgaacacaaattgatgtttgctaggtgagaattcaaggatagcccttaggtttcttggatcttacaaaatggatggataatggtactcttggagagatgagagaagaatcttgtatatattatatgctcctttggtatgtttctttctgtgtggacttagtttcggttgcaagttagtgtgatgcattcaggtagaaatatctactggggagttgtaactcatactgactgagcacactccatatgccaggcatgctccgtcacttaggatgcagttgtgaacaagacgatgaaaaccctgcctttgtgaaacacaggtgggagctgcagcctggggacccacaaggtttaagtggtgacagaaggcttcagagtgaatgagatggctcagtcagatttcagtgaaagagcagcagcccaggataaaatctcaagaacgctaagagactaagaaggaacaaaggagagatggcaaggaaagcaagagaagttgggcttcacaggcctagggagtgatccctagtgtcatacacaactgtgaagttaagggagatgaggactagagatgatctactgcagtgcttctcaaagtggggtccccagaccagcagcagcagcaccaggagcttgttgcaattgcagtttcttgagatctactccagacctggtgactctgggagctctgagggaagggcctagcaatctatgttttaacaaggtttcccagtgatcctgatgcatgctaatgtttgagcaccacagctctattgtgttaattgataagtcactggtgatgcagcaacttggtgaaaataacttcataaaatttacaccctgtttgggcaaattttaaaaatgtttcgtgggactgttaaagttttattctatttgtttagaaatttcaaatgttttattttcttttgcaataaaaatgttgttattttcttttgtacagtttgggtttttttcccctctttgattattcattgacagttgatccatatttttttcccatctgttcagatttttgaagtttcattcctatctcctttgaaacacatcactttacagggtctcaacatgttagggcacctgcatcattgatattggttcattgcccaaaacagagtgcaatcataaagataagtgagtctcaactctgaatggcagcctgagaaaacacctagatggttaattcagctcttccaaaaagttccaagaccctattagggatatatttctaattatttgagcttgttactcatgagaagt

SEQ ID NO: 764 - DNA, 9836 bp, Homo Sapiens
agtccccaggagaggctggtgcaggaaggctcagacactgtgttctctgacataatttataggcccatggcatatgtggggaactgagaggtctttggtcaacagtcactggggacctgggtcccgccaacaaccacatgattcattttggaagcagatcctcccctacatgagccttcagatgatcacagccacatatgacagcttgatggcaacctcatgagagagacagaactgaaaccaccctgattcctgacccacagaaattggcttctatgaggctgtcttgtaggatgcccatgacgatcctccagacactaagatgagaaaactaaggcccaaagggacacctggctttcctaagacctgtaagtggaagagtcagcatttgaatggagaactcgcagctttcggagtctagacttgttttacctcaccagactgcttctactcctagtgattccttcccttagattaagccttgctctcttcccgtgcaatcatgaagaggattatattagtaaatccctgaacattccctgattggggagtgagggtcaaaccaaggcaaatggcaggattgacactcacatcaagggctggctcattaagggctcgggacctggcgatcgagttgcattgcagattttggaagtatgcaagaccacgccagccacctttccagggagagaccatgcaaagaaggcaggtgatccaagggctgggagtggtgaggactgctccagcccctgagcagctgtcatcccagcacaaagtgtcagaagagacctcaaagtgtggtctgcagacgaggcagcatctgcatcacctgggagcttgttagaaatgcagaatcttctgagagaaccagacctgctgcatcaaaatctgcattttaacaagattgtaacttagatacacagtaacacttaaaaaggatggggcagagaggctaagtcagcagcttctcatcacactccaatctgatgctgctagtgctccaaaaagctctcatatcctcactgactagcctagggctgtgtctatcaatgcattatatgacacagatgaagactattgtgtaccttcctcaatttttaccccattgtttcagccttttgtacatctttaatgcaaacatccatgcgagaattcttgtgacattaattttttggaacaacctgttttgcagagcaaatttcattaagccattttaatccagagtttaattttttatacagctcgactcaatcatttccattttttttccattagaatgtctatttgtagtaacattattttcatgggatcaattattttctgtttaaatttacaacaggcatttgactcatcagtctctttttatataccatctttttgctgattctgacttctgctatttggagaggttttcttgtttgtgtgtttgattcttttgtggccattctttctattaagtgaaaatcgtctggatcaaattttgtagatttaaattttgttattagtgatacctgttttttttccctgtcaattttagctcattacacattctagtcattttaaccctgctagttttgttagttgctgatcacttttaccataccagtaatacgtggtagaaataatcaccagaatgaaaactctgcaaaggcaggatttctgtccctttttttttttgtttttttttttttcctgccttatacttgagacttagtgcatggcacatagaaagtgctccatatggccaggcgcagtgactcacgcctgtaatccttgcactttgggaagccaaggcaggtggatcacttgaggtcaggagtttgagaccagcctggccaacatggtgaaaccccgtctgtactaaaaatacaaaacattagccaggcatggtggcgggcacctgtagtcccagctactcgggaggctgaggcagagaatcacttgaacccaggaggcagaggttgtggtgaggtgaagtcacaccactgcactccagcctgggtgacagagcgaaactccatttaaaaaaaaaagaaagaaagtactccataaatatttgtaggtggaaagaatgatattcacatatgatttaatcaaagactgacagtttatctatttgataaaaagactgtgagaagcagagattgatggagacaggagagaaagtggaggagaagagaagatggagacagcacacacacatgcacagacttgaacatgcagacacacattgcacatgcacatgcatgcacacagccacacacgtatacacaaacacacatgcgtgcacacagccacacgtatacacaaacacatgcgtgcacacaccacacacatatatgtaagcacacatgcatgcacacaggcatacacatatacataaacacgcatgcacacagccacacacatatacacacaagcatgcacatacacagaggcatatatacacatgcactaacatacgcatagtcacagatacacctgtaggtgcaaacacctatatatgtgttcacattcatacacgggagttattatatttgtgctcacacatgtagagggtagaattgtggttattagatgctgggaagagtagaggaagagaagatagggagaggctggttggtggatacaaagttacagctgaatgagagataattttgactgttctgtatactgtaggatgaatatggttaacaataacttagtgtatattttcaaaaagccagaagagaggatcttgaatgttcacagcacaaataaatgataaatgtttgaggtgatggatatgctactctgatttgatcattacacattgtataaatgtattgaaaaatcactctgtatcccataaatatgtataattattatgcatcaactaaaaattaaagaccacacatatatgcacacatagacatgcacatgaacacacatactcatgcatatgtgtatacatgcagagttacacatatacacaaacacacatatatgcacacatagacatgcacatgaacacacagacatactcatgcatatgcgtatacatgcacagttacacatacacacacatatatgcacacatagacatgcacatgaagacactatgcacatgtccacacatgcacacagccacacacatacatatatacacaaatacccataaatatgcacatgtagacagcatgcacacagagatacatatgcacacacacagccacatgtatacacacttgtgcaaatgtatgcacacacagacacacatatgcccatacataggcatatacacgtacagattcagatataaacacatacaaacactcatgtacatatgcaaacacatgtacacacacagtctgctggcatagtgatggctaaaccaatgcagggtagggtaaaatgtctctggtgcaaggtcagtaggataaaatctgcaggatcaaatggaatgcttaacaacactcctctgtggggtatcagtgtctccattttacaaccagtgcttaatcaaatgcacattgagttgaactgaatattggaaaatgaattgctacctttgaatgaatctactgaaaaattatacttgtcctgggtcagaccgtgtgaaaagcactgggtattggagatgaaaagtggttggccctttttctttgaaagcttagtccagtggggaagatggatgtggaagctgagcaattaaaatgcagcttgataaaagctgtgctgaaaaaccctcactgagctgagcagtgggggctgggagggagcaggtcttaaactgaatgatcaggtttagtgggagctgtttaaattctgagccatcaggcatttttgctggattcctttcggtgcgcttgttaatcaattataaaataataataatgaacacttcaggagagaggatggaggttgaaagacagtggagggctggacttgaggttggaagatttgcagagacctggattgtgcattcgacctttacaaattgaagcgagaggctttgcatctctgaacatcaggattccactctataaaaaggagaatgaaagcattcagtttataggtttgctgtgagggctcaacgagaatgtggatccaaaaaagctttggaaaccaaaataccgctagttagcttgctgctttattatccaaaagaggctgcaaagatttgaggtttgtttgtagtttgtttgtagattagtcagtgtctactaaaataacactgtgtaacaaccatgcccaaatcttggtggcttaataccttaaacgttatttttctcattcatgaggctgtaggtgggttggaatttggcagatgtaggctggaattagctggacctgcctccaggaccagggttggacccaagtcttctgtacgtgtcaccttcttttggtgccagtgctacctgggattttaatttcatggttttgcagaagcgtaagagggcatgccaaccacgtgaacacttttaaagcctaacatcctataggccaaagccagccacaggtccaaactcaacttcaataggcagggaaagtcctccacctactttaccaggggagtactgcagagcaatgaccgaggaaggaaatgtttaatcctattagggagggagggggggaccaggaacacaaatccctcaaggcaggacgagtaatggttggctgcccaaggttgacagactgggtctcagttcctggcactgctcctctctagccatgagactttaggcaagtcaacatttcagagcctcagtttcctcatctgtaaagtgggtataataatagaattctcacagaatttcagtgaggattgcctgattcatgacaacagccttataagtggtccccttcttttacctcgcatcttctgtaatctcttctctatgcttcatcctttaaatacaaaagtcacccgtaaagacagaaaacagattagtggtggccagaggtggtggagggagagagggggagaaatgagagaagtgctaaggggtatgaggtttccttttggggcgatgaaaatgttctaaaatcgatgtggttatggttgtacaactgcaaatatacaatccctctgcctggaaccttttccccaagaaatctgcccccaccgtaaatcctcacttgcatactgtataatgaggcttttctggaccaccctatttaattacccactcctttctgtccatgcctctctctcgatatattttctctgaatgtttgtagcaacttgacatattttgcatgcttatacactatgtactttatattaaagcacagttatgtaatttatttctctggtcctttcacctcctttcctccctccctgaaatatgccagtagaatgtaaccttcaggaaggcaaggatatttaccttctgggtttgctgctgtctccctagacagctcctggcacacagtaagccttttaaaaatatttgttgaatgcatgatataagccatataatgcttagtaggtgctcagggctgaggaacataattgatgttagcttttattatctttatttacttcaaataacctacttaattgggaaattttccgggtctggagggactctgagtttgagtccagtatcttccctgggagtccttgcttgcacaaatgtgtgggatagactcccgctgtgtctgtggactcaacgtctcagctccaggctctttgctgccaggcatagtgagccgtgacatttataaatctctgggctcttaatcccctgctgatcctcggagaggagtagacatttgttgctaaacacattgccccactttgaacaaagaaacgaagagataccccaagcatcaatacaacagctgcctgcgatggctgtgacgtcccttctatcctaaggaggagggtactgggactcagtcctgtgcactgacctgccccactcacctggctggtgaggggtgcagttactacctttggaacacatatcattgggtttttgtattgcattcttctgtctctgagcagatctgtttgtttaatggtctcttcctcacattcagctcaagcctgtaaatccttcgtataaattctgcctgctccttgataccaatctgttctcctccaagtaaatcttttaaagacaatactccagcagcaccgggagaacatttcctgcaaaatcatgcccggaagcccctgttagcatgcaaatatgcccctttgcagcatgttctgattgtaactcgtgatgcacagtgcagagaattaagccgggtcccttcctcatcagtcaccatttaatggagactgaatggttgtggatacttttgttagggtcatcaagaaggtttgccatgcttggcttggtaaggaggaggttgtgtgctcctgtaagacaaacctagcactttataggctcccaaaagcccatggtagttacaggagccatgaaaaacaaacatgtagacattcagtagtggtctcaggaacccctattggcaaactcaccatttatggaaagacctggagggcagtgtctttggccatgacatgaaacagcccagtaagctgcaaaggccagattgaagagagctgttgaaaattcatttgcttgctataggctggctttttatttcattttattttatttgtttatttattatgttttttagcaaaccatctgaaatgggatgagagagccatatttgggcataccacctattggaccagcagttctacagaggcgagggtccattttttgttttgcagaagcctctctgtcagcagttctcaaaaggaaaggagtttatttatcttcagttcagcaaaatttactaagtgctgacaatgggctaaggggatagagacgaagaaggagattcttgccctccagaaatttacagcccaacataatgtaaacacttttctatacaacacttgcaaatagtaattgtgtggaaattcaaatggtggacttacatgttatcagactctgtgtgtgtgcatatgtgcatgtgtgtgtaggtcactccctaaagaatgacaaatatgctaagattttagttactccttgctttttttgtcccccctcctcgttttttaacctttattgaagtatcattcacataccgcagactgcaaccacttcaagtgtaaagctcagtgactattaatatatttacagagttgtgcaaccataactgcaatcttattttaagtaatttctacctccccagaaagaagccttgtgcccatttgaagtccctctccttcctaaccccagcctgaggcaactactaatctattttctgtctccatggattttccttttctgcacattttatgtaatgaaatcatgccatatgtgggtttttgtgcctggtttctttcacttagcataatgttttttgcagtttatccattagacacactcggaagcagtatttccagtatcagtctatgctctcattttgtccttttccttttacaattgaaggcgcaattaactggcctaaattcgatgaagttaaaggttggccatttgtggcgtgcttactcaattcaatctcggctgagatttgatcccttattattacattagtgctttttacttttctgttttcagttactttttataaaatagtaagagtggaagataatgaaacggctaaataaatcttatcgagagatagtgaaggtgctggagcttcctcactgagcaaacagaactacagtaaaatgataactcatgaaaaaattaaagttggacatatgcattggatttaggggcaccagcgcacaatgtgtgaaagtgcagcttgctcaaaacttgaaggtgtgaatgtcagagactacctgtgaatctcgtcatcattgtcatcattctcataacgataatagcaattcccttttctgagtgcatggtatgtgctattcagttcccacacatttcctcattgaatcctcacaactgctattggaggaatatattatttttattattattttcattttacagatggagacaatgagtcccagtaaatttaaagacacatgcctaagactgagaacccaaaatatctgagacaggtctcagtcaatttagaaacgtttattttgccaaggttaaggacgtggtcggcacatagcccagggaggtcccgatgacatgtgcccaaggtgggcagggcacagcttggttttatacattttagggacacatgagacattaatccatatgtgtaagaagtacattggttcagtccaacgtggaacaactccaggtagggaggggcttccaggtcatggatagacaagagacaaaaggttgcattcttttgagtccttgatcagccgtccactgaacacagtgttcattcctgggcataggccgaactaactttgggaaggaattcagttcatggtttgactctgaaacaaaattgataataaccctttcccaaaaagaccctcttcttgctcggggaccagtctgcctttgcaagactaacaagttagctacaagattagaaattacagtttaggggtcatgcagcctctggctccaagagtctgaacctcctcaaattgctcctggggataacatcactattgtaaaacctaagatcagtgcttgagatattttgcagaccgtgcactccatggatcagctgacaccatgcagaccagtaatctggctcaatcagttctgccgtctcatccaggaacagcaagaaaacctcacttcaaccccctaggactccatctccaacctgaccaatcagcactcctcacttcccgagcccataccccccaaatccccgaatgcttggggagactgatttgagtaataataattaaactcctgtctcccgcacagctggctctgtgtgaattactctttctctattgcaattccccttccttgataaattggctctgtctagacagtgggcaaagtgaacctgttgggcagttagaaaaggagcctgagagatgggttgagggcgggtagagaaagtaatgactgtgatcagaccccgctgagagatttgccattgtcatgaaggtaagagggagacgttgaggaattttaagtgcagatgtgatgtgaacagatttgagttttacaaaagtgaattcctggtggtaataacggtgccttggatcaaagttctcaattccaagtagcaggtgagcatctcagaaaagatacaaagcttcggaccaaggtttcctctcttctcttcagcaggaatcacagtttggggaactaaacttgccaaggagaacttcaggtttctagaatccgaggctgatgaagaaagaatgttggggcagattttgacaggggtctaagctttgcctaatcacactgcccgaatgagcagccactgctgatgaattctcattttcttaactggcaaagccttcttggcacaaaaaaagtgtttatggtttttcttaaaaaagcgtttagtgcctctgagttgagaaggctggtgtactgagatgtggcatctcttttcttgtaaaagttaaggggcttttttcagtcactttatagtttgttttattgatggagaaagggaaagtgataaaatattcttgtcttctaaaatttctgtcctttggcaacaaggatgagaaggtatatgtcccggtaaatttttgggttacaaaataatcccttctcttagtgctctactgactgagttaccacagtgcttcccatacactgtcgcctcaggcaagttgtttaatttttccaggcctcagttgcttagtctgtgaaatgggaatatgaacaccaataccacctacttcttagaagtattatgaggattaggtatctaatatttgtaaa

SEQ ID NO: 765 - DNA, 2300 bp, Homo Sapiens
cacagactatccatacccatgagattttctggcttagaatcattccattggtctattaaatctgttttcttgcttgaggcagtatctttgagaaggcgattctattttagtcctcatacattatacatgataagtataaaaggaattcatttttttctgatagaaaagagacttttacctttagaaacgagaatcataacttaagttgtggtaaaaaacaaaaactcaacttgtcttatttaaatgcttttgggtttaattgtggaagacagtgtggcgattccccaaggatctagaactagaaataccatttgacccagtcatcccattactgggtatatacccaaaggaatataaatcatgctgctataaagacacatgcacacgtatgtttattgcggcactattcacaatagcaaagacttggaaccaacccaaatgtccaacaatgatagactggattaagaaaatgtggcacatatacaccatggaatactatgcagccataaaaatgatgagttcatgtcctttgtagggacatgaatgaagctggaaaccatcattctcagcaaactattgcaaggacagaaaacgaaacactgcatgttctcactcataggtgggaattgaacaatgagaacacttggacacaggaaggggaacatcacacaccagggcctgttgtggggtggggggaggggggagggatagcattaggagatagacctaatataaatgacaagttaaggggtgcagcacaccaacatgacacatgtatacatatgtaacaaacctgtacgttgtgcacatgtaccctagaacttaaagtataaataataaaaataaaataaaataaatgcttttgggtttaagtgaatgaagtcatgaagaaagtgagtaaaaatctactgctagcacctagcagtaattcaactttgtgaatttaagaaaagcaccctcttcgggcaaattgacaaaaggtgaccctactggacatgacaatggacataggcaactctcagatgaattagaaaagagtgccccttcctatgagctgccagagctagagacctggccccaggagtggaggcagaattcagccccaccccttccttcctcctcaaactcattatctcatggcaggggcccaaataacacattttatccccctgtgcaaaacaaagtctatttcttagaattcagccttcttagaaggtcaataatgggaaatgcagggctgtgtaaataattacatcttcttcctaccataacatcataactagcacaattataaaagacagataggaaaataataatagtcatgaaaatgataataatgtactttgaagaggaggaacaggtaaggaatggcatcaaaggctggaggctgagtaaacttcataaggaaaagttcttggctgatggccacccagcttcaatattctgccagggtgccacttgcataatttaagagaactgatccttttccctcacctctattgccacttgtccacacatttataataatagattacacctgggcagagcttgtattgtacagtgccaagtactgtatatatatactcacatcaactgtgaagctgctctctccactttacagacaaggaaagtgagacagagagaggttaaataaacagcccaagattgtagctgatgtattaatccacagctaaatgggtctccttaaagatctggaaagctgctgacaagaagcaccgtcaaagatgaggtcaaaaaggaaactccttttcagtgatccagtacaggacattctttttaggcatggaaccctgggatctgtcataagttatgaaactttgaacaaaccattccacttccacttcctcatctttgaaaggaaggcattggatggcatgttcacttccagctctaaaatgctgttcctctaatttacatgcaaaatagcatgtagacagcctttagggccatctgaatgtaaataccacatctacctttttgaagccatggggcctagctaaaactcaatttactcatctataaaatgagaataataataatatctaccccttagggttattgagaatattaaataagagaataaatgttaaagcctttagcatatcatttagctttggctatgtgactagtacatagtaagtgttcaagaaattttcctttatcactatcatcatcatcatcatcaccctgtgtgtaggtgctacttgcgaaggtgctccaattttaattccctgcagatgcaataaagagttggcaaattcccagctgggcgcggtggc

SEQ ID NO: 766 - DNA, 1772 bp, Homo Sapiens
ctctggaccagacgccgcctgcacgggtggggacgctggtcgctgccgggggcaagtctgccgactccagaaagaaaggcgaaagaatgtgtgtagacccgggcatccttggtcgtcagcatgtttgctttatttaattacagatgttcaggctgctgtcaacacccgacaattttttttggtcatttcattccctagagattgtgaagctaagtgctgtgagggaaaccagaggcagctgagatgtcgtggaagtaacagcgaatgaagccaggatgctggattctgaccttggaactgttctgagtaaatcacttttctcagtaaatcttctggagttgtttccttatctgtaaaatgggataacgatgtttcccttacaatttaatggaggagttaatataactaatagaatgtctgagaaaagcctttgtgaactgtaacgcatcctgcaaatgcttaatattcccttataaaaacgagaggcttggttaacatgatctccagaattttagcttagctctacattcagtgtttctgtgaatgagttcaggtccttacttccaaggaatttgtaatctacagtggttggaggaatataacatacagactagtcactaaaattcaaagcagtgtaataactgtataaatgaaaagctataaatgcttagagacaggagaaatttgatgggggaggatctgtgaggaagatgaatttttaacctaggatttaaagaatgtgtagattcccaacaggctaaaagatggagagaggatggataaaagtaaatgaaacaattacatgttttttcattgtcaagttggcagagatgaaaaagttcaacagcctttggttggtcaagatttggaaaaacaggctgggtgcaatggcttatgcctgtaatcctagcgctttgggaggccgaggcaggaggattgcttgaggccaggagttcaagaccaacctgggtcttgctatcaagaccccatctctgtttttaaaaatataaagagatttggaaaaatggacactcaaagtcaatattggtaagagtataattggtacaaacctttaggaggacaatttgacagttactaaaatgtacataatctagttctggcccagtaatccactatgaggaatttatcgtacagatctgtgcaagtatgcaaagaaaaatgtacaaggatgtttactgcaatactgctttttttttttttttttttgagacagtctcgctctgtcgcccaggctggagtgcagtggcgcaatctcagctcactgcaacctccgcctcccgtgttcaagcgattctcctgcctcagcctcctgagtagctgggactacaggcacgtgccatcacacctggctaattttttgtagttttagtagagacggagttgcactgtgttagccaggctggtcttgatctgctgacctcgtgatcctcccgcctgggcctcccaaagtgctgggattacaggcgtgagccactgcacccggctttttttttttttttttctgacagagtctctctcatgtcacccgggctgtagtgcaatggcgtgatcttggctcactgcaacctccatctcccgggttcaagcaattctcctgcctcaggctcccaagtagctgggattacaggcacctgccaccacgcccggctaattattttttattgtatttttaacagagatggggtttcaccatgttggtcaagctggtttcaaactcctgacttcaggtcatccacctgcctcagcctccc

SEQ ID NO: 767 - DNA, 3602 bp, Homo Sapiens
acacgccgggcgccctgcgctccgagcgctgagaaagaaatccgccccgagatgcacctgcagccccgcgcccatccgtgcgtggctgcggctgtgcgtgcccgcgaacggggaccagcggccgccgagtccgtccacatcgccaggccaggagtcagaacaaggacgggcctgtgatgtgtctgtctatgacgaggaggacaatgtcctaaggaatggagaggaagaaagtgaagggaaccaggtccctggattccatgtggaacagtagcccaggatgtgcactatggactgttacaagagagagacatgatcttccttaaggcattgatttgtcatgagtctctttgttatagccacttaacgttaccttaatacacccacttcatggataagtaaaactgaggcttggagaagcccacattgacacagcaaagaaggctggggctcttgtgctggttaaatggaccttgatgtcttccaaatgttttcatgctggattctgagccactctcctggctgcaactctgaggccgggcagactttccgctggaaagagaactcaaatactggtcctggggacaggaggaggcagtgctggggtcttctcacctgagccgcagaaagaggacaaaggccaccaggagggccaccagggagatacagtggcccaggtagttgatgatgactgcgacatggtagtgcaccttgctttttttctggagcaggagagaggggcagagagccaccaaggagctactggccaccaaggagctactccataggccttcctgttggaattacagaacccacttgaaaccagagatcaagtccagccctatccaccaggcatcccaggagaagccaagaccctatgcccagttccgcccggccaccaaggcccttctgaaggagcaccctcattggggaacctctccagaggctgctacagaagctctgttcttggagctggtttccaggcagaggctttctggaacatggcagctgcccttggagactgctcctctcatcccagttctttccgtagaagagactgaataattggccacgccacgcagccggtatctggaacctgggtctgcctggctttaagctccctcttttccctgtttcccagggacatttctttttttgggtgggggagggatggagtctcactctgtcgcccagtctggagtggtgcagtggcaggatctcagctcactgcagcctctgcttcctgggttcaagtgattctcctgcctcagcctcccgagtagctgggatcacaggcatgcaccaccatgcccagctaatattttgtattttttggtagagatggggttttgccatgttgcccaggctggtctcgaactcctgagctcaggcaatccacctgtctcggcctcccaaagtgctgggattacaggcgtgagccaccgtgtccggccccctgcgacatttcttgggggacaagcaggaattgaaagcagaggcactctctggggtggtctcacgccactttgggcccaggagcctcgggggacctcctgctgggacaatagcgcccaagagggctttcctccaagagcctgagggagaatcaggccaaaccattcccgggggacaaagtctcagtgtgcctccctgagcagtcgggcctgggccgggttcaagccctgtctctcatcggccacatcagcatcatgcaacctgagaagacagctggagagacagcctgagggatggctgctgataccctgagacaaatacatcctgcgacacccagacagaagccagtgacactgtgacatttccaataacaaccagagttctggccagcattatttagagagacagcaaggccttaagaggcacccaggaacaccctgagaggtggccagtgatacctggagaggagagtcagcagcacccccagggacagccagtgacaccccgaccgatggccacgataacagcaaagcagctgggatgtccgaaggacaaatgggcacagctacccctcgggccctgaccagcactccatctccatccagtctggagacctaagaccagcaggcaccccgccctaaggagggtggcacagcgtggtacttggcagaggccactccgctgtaccctcagtgatctgaattgaataagcaatttgtgcccggctgactctgactggactctctgcaggacaccacctcgtcccaggcgctgcagtgccagatccgtcctgatgcctctctgggttggtggcaatgagacctcccttccaagctccccactggtgcccactccattctggcacgtcctctccaccgaggcttccagagctactcctcttaccctgcagtgggcactcactccagcccctcgatcctcaaagggtggcccctggcccagcaacagcacgcagaggagcacgcagagatcttgaggaaagtggaatgtatgccctacgccaggcccatggaatcggagcttggttttaggaaaaagcacctctgcagttcagaagccctggtccaaccaccactcacctctccccacacgctagcactgatgctcagcttgggagagtccccagagcccccaggggtcagggaccgcactggccttcggcagagccacagctggacagccatccttcaacacggtccctcgcccttctgctgagccccaaggcagtcctgtcactggctgtgtggctttcggtgagtcacctgactcctctgagactcaacatcctcatctgtgaagtgggggcaatgtggtctttcttacccacttcactgggagatggaccatttgtggggaaccaggagacctgcatctgcaatataaagtccctacaagcatcggcagggtcatcagcccagcttggctgttctgggccccagaatgcacctccactgcagagggctggcctggagcagctttcctgatgtcccttccgggccctgggggaggccccgcaggctggacctggcctctcctcatcttccgccaggtccttctgccttctcaggaagccttgctttgggaaggagtttttccatttaaaaggctgcctgcggagggcctcagacactgggttgagatggatccagtcggcctggagcaccatggcaggttcctgagcagtgaattatcccagcttgtcaccctcatcatcccagcgagacagccgacagtcacctgttccacggaggcggttcagcaggtcagagtgaaaccaggccttgttgccttccctggcctgggagactctggcggaccctgactcggggcccagagaagcccttgactctccagtgtggccaagatcgaagatgtacctggtgaccccagaggcaagggccccagcccacactttccatctgctggccaaggtcctgggtcctggggtcctgcaggctccacaatcccaatatccgacccttctgactctgctttgctttgcactgtgttcaggtggagcctattttaagcaaaggcaagagaagaaaatctaaacgcgaaaaagaaatgaggtcataaatgaagatttctgtaaaaagctgggtccgccgttgcatttaaatactgggatc

SEQ ID NO: 768 - DNA, 10783 bp, Homo Sapiens
gcacttgcacaacagggaaacaggagtgtcatcaaaagtaaattccagccgagacattctctcctatatgagaagcaaaagtttctggtcctcataccgtgtggttgagtgaaatcaaaacttccacgatagcaatgctgattggacaaagaatgtgttgtggacacaaaaccaaactctggaggacagaggattcattccaagggtctgcttgtattcaatgactggtctacgtgggggtgtgaagtccccttactccacctgtgaagagtcttcccagtttcagaccaccctcccagcctcctgttattggctaaggccattttgtgactacactgcaggtagagatggattcctggaaatacctcctcaaggccagtgtagagccctcaatcacccactgcccccagcttctccttctcccatctcctgcaccaagcaggtctccaggtgttccagctgctgatgacgtaaagtgtggagttggtccaggaaggtcatgttccatgcagcagaggagcgctttgtgtgagaagttgaagacctgctgtaacacatcatagaggaaagacatagcctgggccttctgcaactggctgacttccaccttctcctgggggaatctgaagtcacttctgtcctttagacacaagaagggagagattctcctcatttggcccaaaagcaccaaggtgttcctgcctagcaggccatggttctgaggcaggttatatcctagagatccagaagagccacagctgcacacctctagggctgccagtagagggaagaggagggccattgagaaatcaggatgcttttggcctggttgagctgaggtcttcatagaaccttggatcctaggttctatgaagacattctatctatgcatggctttaatggagcacaaatagttttcatttttctgagcatttctctaaatttttaattccatttattgttttcatttacatgtcttctatatcagcatccacaaccttttggccaccagtttggtggaagataatttttccacgaaaaatggggtcagggagggaatgctttcagaggcattagattctcattaggagaccacaacctagatccttcgcatctgcacttcacaatagggttcctgctcttttgagaatccaatgccactgctgatctgacaggaggcagagctcaggcgttaatgcttgttggttggcctgcttgcctcctgctgtgcggccctgttcctaccaggccaggaccagtaccccggtccatggatgggggttgaaaaaccttgttctatatgacctaaaaggaggtcatcactctacactcttgatttttgcaatggatgttcaatattcccagtaaacttaagatatatcaatccaaatgaatattgatcaatcagatgagaaacatctttgtgctactgttagaagtatatacttttagcccagatcctagcctccagttttaccctccattttgcataggaaatcaggatccctgggccctatgggtttctgtattcagttaggaaattacctatctctggaaattaaactttttaggactatctttgtttgatatttgattcacagaagacgttgatggttattagtgaaagaacttctctggtgcttccctccttctagaatatattcattcaggttcatgtggttatgcttccctgggggctcaagcttagatcaatgaacattgccttttttgcattattttcttactggagaaatatagcactcctcaggctgcgccaatacccctaaaagaaattctgttggtttgtttttttttcttttttaagatgcatatgggtgtggaaattttaatcttaaaataatgttatttcctcagcagtgatgattcacaaggtatttatcacatcaagtcactccctaaatgcaggctcaccacatcctgatgactttagaactccttttccagggaggttcttgcttctttgttgccaaaacaataaatcctttgtgacctttgtccttgctcctagaatatttgggtgaaggagtatatgctgtcagtggtgacctcctcttcttctgacccatgccctaggtatcaaagtctcaacagccctagaacgctgataacaaaggtttgttttgtctaagtaggtaaaggaattatccaattgtaatcattttatcttcagtagttaaataatttttatttcaccaagtacagcttttattctttctttaactcttttgctatctttaattcttttaaactattaacagtttttatgcttaaaatttatgagctatgcacaggagagtcaaagatgctgctgcctctctttagaggctcatattacagaaactggcgaccctcagttgttcactagttcagtgtgatctgttgaagtttcttacatctctgtctacatgaaactttgacggtgcagggcagtgagccccatgctatcacattaaatagtcatagccatctttcctttactgatttgtgattcttcattttaaatttaaagctcaacaacaaatgaatttttagaacacctttttaacatagtggtttactgggcagtttgtcttgctgctaccacattatattctaattcatgatgaagtaacacaaacaaaggaaagtaaaagaaaggcaaaagagctacactgcttttctctataatttccaaaattcgtgtttttcttgtttctcatttaaacttttgtagaaagtactacttgacagttgtttgtagggagaaagaaaacagaagcaattctgattgtcatgaaattgaaataaggggagtgactttccccttactaactgcaaagtgtaagttagcaaacttcaatgcagcaaaaattggggactagagagttttcgaagatcagctacttgactttctttcacttaatccacatgtgatcagctctggagagaaggcagaagtcacaccaaccaactcccaaaagattgacaaccaggctgcagttgctagaacaccaacaatgctctctggcagggtgttagacattaagcttgtctgaagactctacctagttaataaatccacccaggcaatgataagataggcttgaggaacctggaattaatagaaatagaattggatgatcccaaaagtttctattttaatctggatgatgataataataatactaatattaaaaatgataacaccaacatttattgcatgcctaataggaaccatccactgttttaagattttcttttttgagacagggtcttactgtgtcacctaggctgcagtacagtggtgcgatcacggttcactgcaatctgaccttctgggctcaagcagtccttttacctcagtctcttgagtaactgggaccacaagcatgcacgaccatgcttggctaatttttcaaattttttgtagagacagggtttcaacatgtgcccagcctggtctggtgctcctgggctcaagcgatcatcctgcctcagtgttccaaagtgctgggattacaggcatcagccaccatgccaggctgttttaagatatttttaaaatactaactctgtcttctcagtaacactatttggattacacccttttatacaactgtttggagagaaatataaatctggagggatgaactattctgaccacaccaattgtgcaaggtgaaaactttagggagaatcaatataatggcttttctggaagggtcctttaaaggaagtgggggatagatatgaacatagaaagtaaagaagaggacatcaaatcaatggagcagggagagtgagatgactaggattctgagatgcattttgaatgtcaaatggttgctgtctattgctttacagagcaacagggggtgtagtgtaaatgaattgaactgactgccttaagttcagtggaaaagtagatgaaatacattccttttttttttttttttttttttttttgagagagagtcttgctttgtcacccaaactggagtgcagtggcgcaatttcagctaactgcaacctccacctcctgggttcaagtgattctcgtgccttagcctctggagtagctgggactatcagtgcacaccactatgcccggctaacttttgtatttctagtaaagacagggcttcaccatgttggccaggctggtcttgaacccctggccctaaatgatccgcctgcctcagcctcccaaagtgccaggattacaggtgtgagcctctgcacccagccaatgaaatatcttttaagtagtaaaatgaagtagatttgtctgccaattaaaaaaataaatcataacatttaattagtgatttcttcaaaaatatactaaaacaactctattaacctatcaactgcaaactcctagaagccaatttattttttactcttgagttttcttgtgtatttaagaataaagagaaaacaactaataatttctgggacagcccagccatatggactctgactttctcctccttcaggactcacaggtcagcctgctgctcttattgccaaggagaaggatatttctatccccagcccattcaggacttaatcttgtgtactgattgtgtccagtgaagaatctcttcccctctttctctttcggtccattggttgagttgtgagtgctgaaaagatcattcatatgaccaagattgtgatgcttagatgtttatccccagcaaacatgtaaactatagaaatctcagttgtctccaccaaacatctaaactgtatagcatctaagcagcctgaggctttcaccagatgcccagtcttccagccagcagcattgtgagccaaataaacatttttttctttataaattactcagcctcaggtactccttgttagtgaaaaggaacccaggttcagctgctcatctctcgaaaaccaaactcaagagaagagagatgttgagggggaagcagattcattaggaaagcctgcaaactgagaagacggtagactagtatcttcaaataccatcttaaggcagtacaaatttcaggctctttttatgttaagggcaggcagaagaggaggggggtcaggataaataggtgaccatcaatagcagacaactgggcaccagcacaggaccaaggaatttgaaaaattctttgttctttgtcaggtcacaatgctcctatgaatctttaaggtaacctagttagttgtttacattcttctcctttaatcccagagttagttttaaaaattacatgattgctgtttttgcacattatctctgctctaaaatcatcccaacctacgtgcaagaatgggtgtaggccccgtaaacaaaatggagttagttatgttaggtattttgctgtctcactgctacaattgcaacacaaaatgaatgcttttaaagggctgcttgccaaggaagatctggctttaactacagattcagccacattgcttagtatggttgtctttggctgtctatggttggcattacaatagatgatattttccagtcatagtaatagaaggttttatcaaaaaataaatgtttacaaagtgaaaattgtaaggaacacctcttacaaccaagcagttccaaaacaaacagaaacaaatatggtgggcgcactgagcactttcatgcattgttgtgcatctatataagtgtcatatgctttatgaatttttgttttgcaatcatttgtactccttcattcatttattcattttccaatccacttattccgtttcagggtcaagggtggcaggaacctatcctcacagatcagggtgtaaggtggaaaaccccactgcacaggaagctatttaatcacagggcacattcaaacacacacacacactcactcactgagactggagaaatttagacaaaccaattaacttaacatgcacatatttgggatgcaggaggaaactgaagtacctggagaaaactcatgcaggcatggggagaactccacacagacaaggccctggtgggcactcagtttcttctctcatcagtgttacaaggaaatgacatagaatgaaatgtcattattgggaggtcttcctgtgacccttctgttcaagaattgtcttcgtattgttggtctttaaaggaggctgcatcgtgagcagaatttaagagatcccttgtactgcattgtccccatgaataattttccctgcactgtgatgacttgctgggttctagggagaaatcaaaagtttgcatctgggaacggactaacccccatccttcccaatattctgcaggctgctgtggtgtcagtgttaccgatgccatggacactgatgttggccacagctcaacagaactctgtgttctcagaatccacttcatcttctctccttctgataagaatgatctgaacagttgacttaatggtgctcgttggtattattccatctgctgagtacctgacactgatgtctatgctttaaacatctctgtcctccttccacgttctcaggctgctgctggcttttccagcttattccagtgcatgatgtgtgctttcattgtttgaacaaatgagagtcctgtgcctggtgcagtctcttcctgaaggagtcagaacgtggaagcttctaaacagagtcacagatgagctcctgcattctttatcagctcaatggacatagaggtataggcaggactcccttcatttactgcattttgatgccagactggacatcagtgggtctacacccctacagctcatgactcacccggcaggaagggtggaagtaaggccacacgcacactcctgcttctgaggcttgaaaaacaggactatctccagagggtgctgcatggtgatacctcgccatgtctctctgggcaccaggcactgatccctgcctccccacaccttttctcaggtggactagatgttcctgggtggaggtgggcctgggagcagtaaaacctgtctcctcagtgggacgagggcagggccagcggcccagcactcagtgcccccaccactccccctgcctaggtgcctccaaacctgctactgggttccccaatactgtagattatatataacaagttgaaaactgtgagatatgaaatgagatatggctatagagatttttcaggggagggtgacaatatgaagccaaatcagaacttttacatataaatatggtaaaaagtataatataaatgtaaggaaaaaattacattaaaatgtaagcagttacccaagaatggaaggggttctaatatttgaaaggctaattaggcaatcacaaaagacagaaccaagtgaattaaaaaatgttgatgttgtcctgacgctaaactggttccctacaattggtggaggaggaaaggaaaaatggtttaacatgtaaattagggccctctaacccacgaatagaagagaaacaatctaatggttgggtttctaacctgagtcagagttgagagatccctgctaaattgaatgcctgcctggctgcctgagcaactgaccatgattacttctttaattgcaatattgccaagatgcctctcaattctaccctgttgacacctgtggcagtcactatattctctgaagttactttatgttagtgctctctaaaactattgaatccagatggaactgatgcaagctcattccttattcaaagggaaagtaagaattttctcaattataaagtcgaggggcatgatctgataggaggagtaaattagtaaaactgacaacttacgctaaagagttaatgtaccttcaatcaggacagttttcctgatttcccttgaagtgccacagtcagatggggtggctctcacttccacgtgacctgcagtaagtagagtgagggacgagtcaggaggtcctgggaggctgcataggctggaggcaagggacacctcctgcccctttctctccccagagctgcccattgtccaaagaggacatgtcctgcctgaagctgggagtatatcccctctctaagacatgaaatttaaagaaatgggctcattccagtgtttgggtcagttctttccaggaaatttcctccttttagctctgaagaaaaagctggtggaaggcgacagacttatacagagaacagacttgcccactgtctctggtcttggcaggtaggtggctctctcacagtgtgaagttacccttgataccccaaaagccaaagagatcagggaactcaaggcaagggagagcagagctccagatgcaagaaggacccacccatgactcttggggttcctgaggaagacagaggactccatgtagtgggggggtctgtggcaccttttttttttttcattcttcaaggaatcccaggctttctagaagtcttctctacatccctttatgtggtagccagaactctgatgtttctgcttagtaattttccaaccactgaccactaaatgcagaggcaggggcttgtcgatgataagagagacctagatggaagattgaaggtggcagaaggaaggagggacagaagtaaatggaagaaaaagtcttagaggagccagactgggtaggtcttaagcttcccaaaaaggccaatgaagttttactcttttttttttttttttttttaaccggtaaaaatcctgcctacaagaaaggaagcaaacagaggaatcaagtttataataaaaaaagtttaagtttactgaaaaaaattcccatgggataaacaagaacctaaggagaaaatcagaaagactcttaaaaaaatggtagcctggatatcagctttaaattaagctattatttgaccacagagctcttttaaaaaaatacttttaaatcccttatcagatttcagcaagaaaaaacaaccaatatttctaatgtttgaaactttcttttttttctcttcttttaaaacaacgatacctaccaagcgactcagaaccaaaaccaagtcttttgtgacttaaccaaggatacatgagacatcattaaagaaatgtaaagatgcagccctctcaaaattcagagctacccccacaaatagccaaaagaaagaaagatttagatgccttgagagctggcaataggcaatatgtaagcttttaatgggagcctccaacatttgtttagcccccttcacacaccaaagtgtgtcctgacaggcagcaagccaagttgggttctcaggacacaaaacaggaaaatgacagctgttcgttgaagggaaaggatcaataacaaatgagtccctgaaatccaaatttacataagagaacagttcaaacaaatgatctcctgctgacctgcatttggaaagtaagatataaagataaatttttacctttagttcttgaccagaaactacaggcagagattcagaactcaccttggtaaaaattcttacctttatttgccagctctttatcagttgtcccaggacctcatcaataggtgagtcaggtgcttcagacatcccatcttcatcatcagaactataagggcagaaatagtgtgatctctttccttcctatcaaaagggtcacagctgacacggctataataaggcaggttaacaagcgagaagcatagcacgtttatttaatcatcgttttatataactatggaagccttcaaaatgaagacccaaagtacaggaaaaaactatccatttttatgcttacattccatgaggaatgggcagctgtgcagaaatgtgattagacaaaaagggcatcatctaatgctaatattctgagtaggggaaacccagcaaggcctttctggtcagatacttcttggcctctccatgcaccattccttcctcttgggtatgtggcagagctctttttggaatgggggtcttagtatctacaatcaaacaaggcaggtcagagaatttctttatggccagttcagttcttacacacaaaggtaagggaaagttcaagtaatgtttataggtttttatggctggctttggagagaaagggctctggtttctattaccagccttgggaaagagagtttctactttttatggctagcctcgggagatgaggggtgacaaacaggagggcaggagaaggccagagagaaactttgcttctgaggctgcttcttagatcttcactttggcgtattattttccgagcttcaataggagtgaagaatgagatccagaaaagctggggaagaaggagagaactgtgctgggtattggaatcagcaaatgaatagtatgtctatgtctatttcacttaggtttaagaaaataaactcttccagatttttctgtaagatactgtttcctgactgaatatacaaatgagacttatcttcagtatgaagggtgacttatttttcagttttctccagaatactccaagaattctgctttttatattatatgtgttacagagatttaggagagtattctcttttctgttctttctttcttttttttttttttttttgatggagtctcgctctgtcacccaggctggagtgcagtggcgccatctcagttcactgcaacctctggctccagggttcaagagattctcctgtgtcagcctcccaaatagctgggattacaggcacccatcaccacgcctggctaatttttgtatttttagtagggatggggtttacaatgttggccaggctggtgttgaattcctgaactcaagtgatccacccacctcggcttccaaagtgctgggattacaagcatgagccacggcacccagtcccttttttaatgtatatatataaaggaaataata

SEQ ID NO: 769 - DNA, 2718 bp, Homo Sapiens
atcaagcgatcctcccacctgggcctcccaaagtgttgagattacagcatgagccaccacacccagactaaaaggcagtttgattttacaaatcaaaatagcagtaatctatggagatttacttgtgagattggtaggaaacatcttaaatgtaatcaaacaataacttacatcttgatgaattcacgtgtaggtttctcttcctcagaagaaatcagatgctgttcagagcacgaaggctagaattttaccctggttctcatgctaccttgcacccaggttggatcctgagtacagtttttggcaggtgggcctgcatataagttagcaatgggggatacccagctgcctctcttcatacagctgaggttttggggagtcattcttatagcccctgggttgggcctagtcctgcaaatgaattcaccagccctaaagcccaaattgcagcctctgtcattcaccttccaggagtggaaagggcagtaagtttcatcttattattattgctattttggtggttttgttgaggttggtgtgtgtatgttagtaagataaagctctcagaaattacatagcatttgtcaaggatataagagggactgtgccacatctggctgtatagaaggtggttccatatctttaaatagagccccaggtccttagccaccagaaaggttttcaggggaagtgtgcaccctcagcagctgctgctggtgggcaggatgggcacgcatggaacaggctttcctctgtggccaggtgagaagcaggtggtgagacacagagcagtgctgggctctgcttctgaagcctccaacctttccttccctaggaagccccagagagattggtgagggtgatttcccaggaagacgcagtgtgctctgacttctgtgacagtgagcaacgggaccagtggatgtccagatgctggcaatgagtaggccttccctacgctgggtggcgtccacaccctccggcttccattgcctgggtctcctggaggtggtttgctggatgaataccgcatgcacagaggctggccttgggtttgaatatggcagccagtggacagcatgtgcttcagttatgagactgcccaggagatgcttcttccaaggcagagcacgtgcagagtccagtgctggagaggccgggtgcgcagttgacccatttccagttctgttttccctctcatgttcctctgtccccatctaggacatgctctggagtcagaagacagcgaaaagagaagcagaagccccggtggcaagagtctgaagcaggaaggatgactgtagcctgtggattgtactgcagtaggaaactgtcctagcaaggctccactttgccccagcttcaagctggaaaggaggagaacatgaaacattgcttgaagacaatggccgagacagcaggtcccaccctgcacagccaccagcatctctcccctcagccctgtctcctcttctgcagttgggatctgcacatttaagcctgaaattgtcctgtgaagtgaagtatgatcggacagcctcttttcagcttttatgacaatggagacagaggaattgtggctcttgccaaggtcacaggattggaatacagagccaagccaccccaggacatgcaagagcctcagaagggaaaaaagcccagcaggaagggagaacaagtagcctctgtcctgaagttgtaacagccaggggccaggatggaggaggaggaccccataatctgcccatctgggacttggcaggggacctgggaaaatgtaccccaacccatcccttaagggcctttgtctttggcccattggcctagcatctacttcttcaccgtgtctgttcttgtcacacctagtcaggtctgtttgggtctgaggtgcatggaacattctgggtaggcctccagcaaacggaagctcttcaccgtgtttccagcctgggaccaagggcagcatactggcaaagttgccaaagcaagggactccagcctcttaggagttaatgactccctctccccagctgtcctccccttggtgctcctcttcctccctcctcctgctcacagcaggcagggcctagacccgggagccatgctgctgtgctgttgccaggggagcacggaggcagatctgagctatgcagggaaaaggcccagcctgtcaaagtgtctgagatgaaccgccgccgtccctgtgcagctgggctcagacgtgtctcagctcttgttctgtgcctgagaatggcgaaacccagtgaggttcaagggcaaactcgctattcattagtcaggggttcttgacgtcccgtctctcccagggatgagttcccccctcctctttctccccctcctatgacacattcctgggtgcctttggtgaggactgcacaccctcctcctgcctagccccctctccaaaggcccctgaataaactccccccaaggagaccaggcagggcagagacaatggctgcaggaaatcattcaggcgggacatgctggcctgccctccacccagtccccctgtgggccccactcccttctgattcagggcacccttgggcccccagcctatacaggcctggacaggaagaaaccactgggaaccaccctaaggacaacatgctagtccagtgccattcttcgctggctctgtgggtgcctttgtggcctgtaccgactggctggctaattttgtggtttctgtac

SEQ ID NO: 770 - DNA, 15344 bp, Homo Sapiens
gtccccggcgtccgggcgccctgcatggatcccccaccccagctcctgctccccggcggcggccggtgggcagaaagaccgaaacccactcacggccgcctgccgaatcgcggctctgctgtttgtggggcgtgctagaaacgtggtcctaaaaagaatggcgtccatttacataatgctttgtttgcgtttcgcaagtttctttcggttaaagccacagaaaccccacctcctgcccttgtgtcgtttccaccgcggcacccttttccgacattagaaacaatagtgtacgcctgtggaggcctcgtttgttcaggggctgccggccagggcttcaggacgtttctgcggctttccccgcgcggcctgggctcccgcggctgcttttcgggcccatgggcgcagccactgcgccaggctcaaggggggcggccccgtcagggcccgccatcttggaaggccttttttgccggttcttcccgctgaggaagtgtcgctcaagacgctggcctatgagttgtgatttctgccttttccccttcctccttgggctaagccagaccagaaagggccccgtgcgcaacgtgcttcacaatctctcagggaaagcggctaacgtggcgctactccgcctcccctgttccttacccttggggcggccgccatgtttcctgaacacaaaatggcgacacgtggttagcattcgtcgccaacgagaaattggggtcggcccgaaagctctagaatgcacccctcttcctccccggggccttccacctccgcgagttttatgacttaaaaaagcccacaggctggtctgaaggtcggaggcctaattttaacgcgttttcctccctttaatttgaaacgggaacgcgaatgactgtaaaatgtgggcacaatatttaatctctcgcctttttaaagcttaatagtggataataggggggcagtatcaagggataatttgggtccccacagtaccaaagcatttagaaacctctgtttaatttaaggaatgagataagttactgcttttctagacttcctagcatgggctgttgtgctggagagaacgagagctacgaagagactacagtgcctctgactttttcataggacagttggccgaggaagacaaacataaagatgaagtgcttaattcaaggtcacacaatgtcggggatggacctccagatttccttactgacctgcattatcttgtggatacctgagtgaattccacaccacccattttatagatgaaaccactgagacatggagcaattgactgagtagtcactgccccacccctgcctggagcctcacacatgactcgcctcctctcagtgaccacaggtgagacgtggtcttgtaacacagtggttaagaatgtgactttggagccagcctgctaggggctgaattctgactcagccatttactaactgtgtgaccttaggctggagtgcaatggcatgatctcggctcatcacaacctctgcttcctgggttcaagcgattctcctgcctcagcctcccgagtacctgggactacaggcactcgccaccatgcccggctgatttttgtatttttaatagagatggtttcactatgttggccaggctggtctcgaactcctgaccttgtgatctgcccacctcagcctcgaaaagtgctgggattacaggcgtgagccactgcgcccagccttgtattttttttcagtttgggtagctgtccctaattcatttgttaaaggagaagcaagagcaagaacctttaatctgttctcctcttccctaatttgaaagtagcttgttattttgaatatcactttctctgaaatagcacatctccatctcagagaatggatttaatgtttggatacagccaaaagtcatttcattaccaaaccatggggtgaatataccatgtaaagcagtttgggatcagaactcacagtctgaattgtaagtgatgagactgctgtctctctgctacagcttcttggctggctctgaaggctctttgaaggcagatcctaacaaggggactgctttgaagggccattgttcatttggaatgataaagtctatgttgttcaaaaaacaaatgcttgtagcaggtattttttcactccagactgagaatattggtgggatattgataaggggtactgaatggtaataaacatgtgctctagctctgtgctagtcagcttatttcagaactctagtttgattcagtttcttgcctctgactcaaaatggagggagagtgatttttacataagagaacacacccacatatccttttggcagcagctacctgccagagatgttgaagaagagtagccaacctttacacagcagatattgtgtgccagtcatagtcctaagtataataccttacatgtataaacttcttataaggttggtgctctgtaccgaattgaatagtatcccccaaaattcatgttgtcccagaacctatgaaagtgatcttacttgagggaggggggaggggggagggatagcattaggagatatacctaatgctaaatgacgagttaatgggtgtagcacaccagcatggcacatgtatacatatgtaactaacctgcacattgtgcacatgtaccctaaaacttaaagtataataataataaaataaaaaaaaaaaagaaagtgatcttacttggaaataaggtctttgcacatatgatcaagttgagatgaagttgtactggaaagtctgtctagtgactggtgttgtcataagaagagagggacacagagggaagatggccacatgaagatggaggcagagattgcagttatgctgctgcaaactaaggaatggctctggccctccaaggattgctgataaccaccagaaactagaagagacaaggaaggattcttccctagagccttcagagggagcatggccctactgacacctggatttcaaacttgtagcttcctaaactgcaagagaataaatttctgttgttttaagccatatagtttgtggtaatttgttatggcagtcctaggtaattagtgtacactcttaccatcttcattttcagataaaggaaactgaggcccagagaagtcaaatactttgagatctctgtaggcccctactgtgctggctgtgcatagattccatacctcctgctgttgctgttgttgggtctccacctttaccatggccatcacctcctggcagtgctggagctgagctgctggaataacttgtttttcttttttcttttttttttttcttttaagacagagttttgcactgtcccccaggttggagtgcagtggtgcgatctcggctcactgcaacctttgcttcctgggttcacgccattctcctgcctcagcctcccaagtagctgggactacaggcacacgccaccacgcccagctaatttttgtgcttttagtagagacggcatttcaccatgttggccaggatggtctcgatctcttgaccttgtgatccacctgccttagcctcccaaagtgctgggattacaggcatgagtcaccacgcctggcctatgacttgtttttctaacacaccaggccatagcctttcttaatgttttgcctgcttcatactgtaaatcagaaactcctctcgggaggcttctgactgtagcctgaccatctcacctgatctcttctccaatccctcttcccctctcccctttattttccctttgctatttttacttttcatgcagtgtcagagaagtgtagtgactatgtcgggggaggatcccccagctgcctctggtagttggttttatacttcccacttttggcgtgctgtaccttctagaatttctgtcagtagacaattttgtgtttttctttggagctttcaagatcttgcacatagcttatatagttacatggctgtgaacagagaacgggcagtttcatggtggcattggctgtgagggcacttacattgatgaattcaacccaccacagtggctgtctcccctgtcaaagtgagtgaggggatgagagcattttctgaaccagctcatcttcctgaatagcttcttgcatgcccctgggcttttctgttggcatttaattgctggctgtggaatcttgcctgttttccaatatagacctttggctttagatcctgttcttgttcttacccactctcactaaactgaactccaggaaccacatctcttttgtttgctgctgtatcccaggactgagcaaaggcctgatgcttactaacacctcaagaaatatttattgaatgaagaaatgaatattgacctggaaagttcaaactcttggttttccttgcttcttcctgaagtcaggggccagattaagaatttgtttaatagtcttaagcaatagaaaaattattatgtccctcatactttcatccctccgtatgtattttaaaaacagcgtaaatgcaaaacaagtataaagaaacctagcaaaatataaagaaaatgcagcaaaattctgatttttaccttggttaccactttcataaatataaagtaacttaaaatatttgttgttgttgttgttcttgttttgccagttccctgagcacatgctgttgagtaatcctgcctggaccagtacttccctcaccctagacttcaccttcagttcccctttataccacctgctgaagctgccagccagccttttcgaccaccctccctcccccaggggtgtttggcttctcagaccccagcctgagctagtgcccttggcttcctagggtcttgccaggaaagcaaaggagaacatgcataccgccaaagagtacctaataataagaactcccatcctgaattgtgatttatagtcagcatagcacatgtgtcaggtgattatacttaggctgattttagccttaataatctgcttctgtgatcctgtatgtgggaagcctagaaatttctctgtgatcctccttcctggatcactaagagacaagtcaagacataggtccattctaccacctgtgttaatctgggccttgttgagaccatttaaagaaaggcgtgatgctagaagtaaggtccaggcctcctgcacactgtttcaaggctgtgaccatagtcagatcctgttgcttgagtccaaagagtttaaaatagtgttggaaacctcctagggaaaaaacaaaaaacaaaacaccacatcttcctgggtaaggaagtgacatgtgctgactagagcaggaggggtagccaaggctccaagttctattctggacctgttgttgatttgaggtgtgacattcagcaatctgagctgatgttctgtagctctgattggtttctcatcttctgcagagagagtgaaagaggctgtgcttgcaggggaaaaggtgaacactggtctcctgtcctttaggagagcttcaccattacacgtcctgcctctcatttgaatttccaggcttttttagagtctcgctctattgcccagattggagtgcagtggtgtgatctcggctcactgcaacctctgcctctgggtttaagcgattctctcacctcagcctcccaagtagctggaattataggtgcgtgccaccatgcctggctaatttttgtgtttttagtagagacagggtttcaccatgttggccaggctagtctcgaactcctgacctcaagtgatccacccacctcggcctcccaaccaggcttttttaaatgcagaaaccgcccgcccccagagttaatatggaaacccagcaatgttgtttatgttttacttgaattcgtttcatcagaattgcattccttttaacagtgtgattagatcagctcttagaggggatggcagcttcagtagggtttaggaaaggaaaggaatatttgtgtggggcacacactttggctttgatagcttgaggataccaggtacatgataatttagatggataacagaaacttgtgtcccttgagagccaggcatgtattagatgctttcatacattatttaattgtaatacaaaccaataaagtattcccattttttgcacatgggcaagctgaaagtcaaagaagttatgtaacttgcccaaggtcacacagctaataaaaaggctgagctaggatttatttctcctcaagtctgtacaacgccagagcccatgctgttttcacagagcttttctgtccctggtgagatttaggaaaggagggtaggagaaagaagggtgatgagatgccatttttacccaccttgcgattttgcttgttgggacgtgtttagccagaacattctgtttatagaatactagattctatatatagagatgctgcagcaacatatgtgggaaagataccaattggctgtaggtgaggatttcaaaaagcctttgttcttcatcacagcataggccacacgtgtcaaaacaccactggtaattggtttactgcttaagtggctctgtcctatcatctacataaaatctgttgatgtggctcacaaagtcaggtgtgatggggccagaggtgagggtgtggtgtatcctcactgcatgtactggagctggtggcacctgttgtgtgactactgcagtgaatgattactgagtaaataagaggtgtctcagccaggcgtggtggctcacgcccggaatcccagcactttgggaggccgaggtgggcggatcacctgaggttgggagtttgagaccagcctgaccaacatggagaaaccccgtctctactaaaaatacaaaattagctgggcgtggtggctcatgcctgtgatcccagccacttgggaggctgtggcaggagaatcgcctgaatccgcgaggcggtggttgccgtgagccgagatcgtgtcattgcactctagcctgggcaacaagagtggaactctgtctcagaaaaacaaaacaaaacattaggtgtctccttttttcttctccaagggagaccagatagcagtgggtgctggcacacatccagggatcctggcccctgggctagcagaagagatggcttgaaggtgtcaggtgatggaataaaaagagctggtctgtcaagtggtataatttcaggggaccaagaatgtgtcctgcccctcaaaaacttgccctagctgtttgctattgcttgggatcccacaattgaaatttctttttcttgatttaaatctttgagaccctattaaaaatgaagagactccaggaagagttttgattgtgaaacattttggtcatgttaactggaagtatgaatgagtttataagattgatttctgagaaccagactgaggaagggatagggaggagaaggcactgtgcccctagttgcagggacaagaaggagacaccaatgagtttgagataaaggccttgaagagagatgctgggtctctaaagaaatacttggtttccttcacagttttgtctgagaaaagacaagcagctgacagtgctggttatggaggcccatgaccccaaaagaggttgtgctgagtagatagcccaccagcatgttcggatggaggcacaatgttgtctggagagcagctgacagctataatgtaaccaggagtgctggacctttgggtctgtggtttactgtgatgtactgagacaaagactgtcacagatcttagaagggggaggcacagcttccaagaaatgatgcaaaatggtggcgcaaaagaggccaccagtggcaacaagggcagggcatttcctttgtggctggtggtcacggacaacttctggtctcaatttcccaatgagctatgctaagaaatttaccagaaagcaaaataagccatgcaaaaagcgatgacaaagcacttggggtatccatgcaaaggtgcagttcccccttgtccactaattttgtggagccaaaagagctgatccagaagctgcaaagatagtccctgtgattaagacatacaacttttttttttttaaatgcgagactctgtcttactctgccacccaggctggagtgcagtagagcaatcttggctcactgcaacttccacctcctgggttcaagtgattttcctgccttagcgtcccaagtagctgggattacaggcgcgcaccaccacgcccagctaatttttgtatttttagtggagatggggtttcaccatgttggccaggctggtcttgaactcctgacctcaggtgatacacccgcctcggcctcccaaagaaggcatacagcttttttggcctgagttcttccaaagagagacccttcctagttgacttggcatcatctttcattcaccagtgttctctaactgcctttatgattagaattctcacagcgttttctcccccaagggcatattttacagaggcaactcaaatctcagtgcctttctgaactccttacaattgggtttatagatgcctccaccctgaggttcaatttcactgtccatattcctattctaagtctggagcactttatttttgatccagacttttagcttcactgaggcctcttgggttctagctaatttttttggacacatttccctagtgggcagcctaggaatggcctgtcctccctatcccccaaagtttggcaaggtctgtaccccctaccttaatggaatcagcactacttgagatttctgaacatcctacaccgtttcctctcccctcaacccctgcagcctcatacacgaggtctagtggaaagcaggatctgctgatcactaggatattagagccagtgtctccagtagggaagaactcctgggcatgtgttctatgccctgaatgacagctctctgcctatcagtttctgctttccctccatctcacctttattttggcttttacctagaagtacaaactttgtcttgttcctctgcctggacttcctaaccctgtccaggactaaagccctgctgtcagtccctcaccagggactttccacactttccctggccaggtcacttatctgatactagagccttttcttgcatctaggctttagtaggtagagttctgtccatgcacagatctccctgtgttgaccaccttgaacttcgcctagtgctctttgcgctaattagatgccatgctagtctgtcctgctgccttctggaacaaggctcttagctttgttgagctcttgccctggatttcatgttagctgtccagctgcctgcacctcaaaaagagcttttaatatgcattataaaactccaaaagggaaatagaatatataacatttttcaaacgtatttaactagagatccattttttttttctgaaggaatatttattaaaatcttacagaatatgtgtttggtggaatacagttttggaaagagtgaatctttatcccaaaggaatggacatcaaatagagtaattccagatgaagataatgttactattaccttcatctgaaattccagatgaaggtagtaatcactatttcctgtgtgtctgcataaggatagctctaatccgcagtggaactctaaaatagggaggaaggaagaattctgcattctttcttccactttgaatcctcttcttcccaatggaaacaggaagtggtaaatgcaatggtgccatcacggccatggtcgtcactggcttctggatacaagataggagggcttctctgaggctctcttccctagattggacctctcagaatttctctagagtgctcctgagcacccttccttctactctgggactatattcatctcagcatcagtctcaagtttaactgctagttcaggattttgatgttacacatggggatcagtgccagatgggatgtagctcatttttatggaatgagtatgacataaattttctcctttccctattaaatttctcttctatatcttgtgggcagtccagactataatttttttttcaatccttgaatggagataagctcatgctctgtgggcagggcggtgttacaggtgggtcgccatttaaatccgactgggtgggtgaccacgtaccaggaatggaagttggcttagctagtaaccaaagagcaagccagttacttcccctgcatgccattcccaaccagcacagctggggaaagaccacctgaaagaaatctctaagacttctgatgaagaaattactaggtcctcttgagaccctcatgtatgtgtctttattgtcgtgagtgagatcattagttggctgatctcagttggcttagctaatcataaactagatggaaaggctcagctttgaccatgaccttaaatatggatggaccatgtccttaggtatgttctttgagcatccagtaagcagcattctccgtagacaagccccacccttggggccttagcctatggcatttgtccatttttgccatttcttctgaaagactatggttttaactgaagaccagggagtcagctcgcttataggaagtgggaagagggcttgaaatgggcattcagagatcttaaatagagcttgtagtttatttggtcagtctacaagtatttgccacgttagtttagtttagtttagtttagttttgagtcggagtctcactctgtcacccaggctggaatacagtggtgtgatctcggctcactgaaacctctgcctcccgggttcaagtgattctcctgcctcagcctcccgagtaggtcagattacaggggcctgccactgcgcccggctaatttttgtacttttagtaaagacgaagtttcaccatcttggccaggctggtcttgaacttttgacctcatgatccacctgcctcggcctcccaaagtgctgggattacaggcgtgagccaccgtgcccagccggtatttgctaagtattaattggcttataactgtggaaaacttgttaacagctttaggaaggctgttagggaaagtctcaggttgcagtgagctgagatcaggccattgcactccggcctgggtgacagagcaagactccatctcaaaataaatgaataaaaatttaaaaaataaataaagagacaaagtcttgctctgtcactcaggctagagtgcggtggtgtgatcacagttcactgcagcttcaaacttctgagctcaagcaatcttcctgtctcagcctccctgagtagttgagattacataggtgggtgccactatgcccaactgtctctactccctctatatactgtctctagatgatgccatctatatttattggttcagctaccactgatacatcaagtactttaataccatcatcctccacctagatttttctctcttctgagtttcttactcataatagccaaacactattggcattgtaacctggatagctcttaagcaccttaaactcaacatgtctcaagccaaattatattgttcatcacaccattctctttccctttccaaacctcctcctcctcctcatttccttgatttaggagcatcactgtctggcgtcatttgttaacatgcttttgcattactgttttctattcccccactgggaatttaatagtctccggttgtaatgtaagatgtttaggatgtggttctttcttttcttattcaagaacaattaaaggttaagctgagattcagactctaagtaaaatggaagtcgtggagaggaagcatctgagggctagaaccttggaagaaaacttgagagttgactaaggccacccttaggtgcagtaggggccagaagacctttttaggagcatgcagaatggagaagaggtggggcatatgatcctcagtttgtttcttgtgcaagcagagtaattggcacctcccctgctggctgtttgtgtaaatcactgtggaacctcatgtaatctggtttaaacgtctaaggattgagcatcctagtataacccatcagctagctggagtcatccttctccttaaagttttggctgaaaatgtcattcttcaacttacagcaagttgttctgattccttcttcagatttcttcaaattcccaggagctctgattttgagctcttgcttccattgaatttgtttagattatggatggtttactagatcaagtacactgaccctgtttccatccacaatgatacagatgtagaactcccagctaaagcctttatatgcgttgcagactttatcaaaggtttgggataatggagagaattcaacattgcaacaaagtaagcaacttgaattctaatactggttattcctgttcctcagagtacttttgcccacccctccactagggatttgtcattattcatatcacccacatatgttggctttgttttttttttttttttgagatggagttttgctttcgttgccccggctggagtgccatggcatgatctcggcttactgcaacctttgcctcccacgttcaagtgattctcctacctcagcctcccaagtagctgggattacaggcatgtgccactatgcctggctaatttttgtatttttagtagagacagggtttctccatgttggtcaggctggtctcgaactcccaacctcaggtgatccgcccacctcggcttcccaaagtgctgggattacaggcgtaagccaccccacccagctggccttggtcttttataatcttatctttctctcctctgcaaactctccttagcatattaccactagaactccaaatacttctgtcattctattttgcaagcaatttaactctctcaaactcttcctcctaaaatcacttctgggttcacttctgtgtgtccagagcctaccaagggggaataaagagcttcatacgcttttttttcccccttgagacatggttttgttctgttgccaaggctggagtgaagtgctatgatgtggtcatagctcattgtaacctcaaactcttggcctcaggcaatcctcccaccttagcctcctgagtagctagcacttacaggtgatcaccaccacacctggctactattttttttgtcttttagtgacagggtcttggtatgttgcccaggctggtcttgaacttggtatgttgcccagcctggttgcccaggccactggcctcaagcaattcaactttcttggcctcccaaagtgttgggaatacaagcatgagccactctgcccagccttcatgcatttctttagctacacaaagaataatatgtagaccctctgatgtttacttttccattatcttccatcttttgaaggtatttcttgttttgagtagcacttactgcttatctgcataatggttttacattgaaggatctatggaggaaaaataggaggatattctaggtaaaagcaacaataaaagcagcaaccttcacaaaacctgttgtggacaaatgaaaaactagtccaactgggcagaagaattcttgtcaaggaggagagctcacaatagattagaaaatccagaaacagacctaggtttcagcaggaaaggatagtgttaggacaaatgatacaggacagctggctgacaagaaaaaaaatttctgtcaccatataacaaaattaattctaaatggattacaagtttttacataaaaactaaagtaataaatgtactagaagataattttttttttgaagtatggcactaaaggcagaaactataaaggaaaatgtgtgatgaattagctaaaaaaaagtaacagcataagcaaaagtacatgacaaactggttaaaaacagttttcaacatatctctaatgtacacagagcttttacacgttaataggaaaaaaaataccacaaaaaaatgggccaaagtcatagaagaataaattcaaatgtgactaacaaagcatatagaaaaaggctatttcagccaggcgcagtgcctcatgcctgtaatcccaacactttgggaggtttttacaaaaatgaattagccaggagtggtggtgcacacctgtagtcccagcagtagctcaggaggctgaggcacgagaacggcctgaatgcaggaggcggaggttgcagtcagctgagatcacgccactgtgccccagcctgagtgacagagcaagactcatgcctgtaatcccagcactttaggaagttgaggcaggcagattgcttgagctcaggagtttgagaacagactaacaagtcactgattatgccaaggtgtttatctacaccaaaattggaaggttacctatcatgatggaaatggggctaactggaaaggggagccactcctctagaaggggaagatggatttgtttcctggagttgaatttgaagagctagaggtacatccaagaggaaatgttccataggctggagatttccatttagagaaaaaaattacttctaaagtagaagcaataggtgggagtggagactccctagatttggcacctttgacaggcttggaggggaggtggtattttggttcttcccttcctgccagaagtctccttgagagagactggagaggagtgtgtggtctcaattagaacctgaagagtagagactggggagaggtaggagtgggcagtaatcataaacaacagccacaacagcatttaaaaattactttaggccaggcgcagtggctcatacctgtaatcccagcgctttgggaggctgaggtgggaggatcccttgagcctaggagttcgaggctgcagtgagccatgatcgtgccactgcactccagcctgggtgacagagtgagtccctgtcttggaaaaaaataaaaattactttagaaagtgacactatagtgacttaagtaacagaatcctgtgtgttttagattattacttttttttgttttttgtttatgtgtacacttccaattttggtgtagacaaacaccttggcattatcagtgacttgttactctgttctcctcttcctgcctgagagactgtcaaatcagcacttattctataaagtgtctttagattgatccatttctttataatcccacccgcccacgctagttgctaccttattatttcatacttgtattgccattacagcttactaactggtttctctaatttcattttctgcttcattcattttgcatgctacaacataaaacctgccctgatcactgcttttatcaccactatctgctcaagagcctacaatggctcttcattaccaagcccaccaaggtaaaataattttgtccggtttcagcccacccaccatattcaagtaacagggtgtctctttttctgcccacctcttcactgctcctagctccaggctgcagcttttgctctgtctgcccctctttggaaaattcatctctaagagacagggagtggagaaatgagaaatgaactttgagg

SEQ ID NO: 771 - DNA, 1315 bp, Homo Sapiens
gcaaagtgctattccaaacagatataacttcatcttaactttgacattttacagataccttccaattttttttttttgagatggagtcttgctctgtcgcccagggtggagtgcagtggcatgattttggctcactgcaacctccacctcctgggttcaagcgattgtccggcctcagcctcatgagtagctgggactacaggcgcccgccaccacgcctggctaattttttgcatttttagtagagacggagtttcacgatgttagccaggatggtcttgatctcctgacctcatgatccacccgcctcagcctcccaaagtgctgggattacaggcgtgagcgaccatgcccagtcccaaatatttttaaaattgcaaatgacaaagtcaatggggttcaaaactaaattcttaaactaagtaaggagataacagacaacatttaaatttgtctttggaaaacaactatgaaatattaccattttctcctatcagatcaagtcagtatttcattctgaaagcaatgtattaacatgtgattttatgaaataatcaaggtataggcaagctctcttgcggagcatacacattaactcaggatcatcctcattgctgttttttttcccccagcacttgtgaggccttgtaggggacagtggattaaatagccttcagggtcaaaacagttccttgacatttggattttaaactcctggtaattaaaattgattgcataatttactcctattacaggtgtgacacactgtgagattcaggattataattctttggacttaaaatggttggaaacaagctgggggatctggactttttcttccctccatgccttccctcttcaatctgaagactcagaaattatcccaaaccatagaaaagtggagtatttgagaatgaataaacttataatccaatgagtagatttctaattattatctataaagagatgaagagcagtggatagtggaacaagaattaacacagggagaaaggaatctcacctttagaatatctctaggataatatttttcagacaactgactccctccaatcctcttttgggtaatgataaaactaaatgtctgatctgcaaagaaaactctcaccagagacctgctgattcaagaattcagttcctgcccaattggaatactgccaacatttttccaacctaacaggaatgcgtctgcagtctaagtaagagcttcttctctgaaggtaaaagacgggaagttttggtgttgttgacatttcagtgagtgctgccaacatctggcatactagaattgatctac

SEQ ID NO: 772 - DNA, 2442 bp, Homo Sapiens
taatatatgcaacgcttggccctcgtgtctgacatgtaatggacactgttatctttaattgcaaagctaatatttattcaaccctgtaataaaacagagtcctaggtgtctgtgaagtaatgaggaggatataaacctctgagcaaagctgagtgagctttcacaaccatgaggttctctaaaaatgacaaagcagacccttgagctcatctggctctaagagtgtcctaagcactcactccatctcctactggattgatgtaagtataaaacaccttcatgggcaattcaactgttaggaaagaggtgtaagcctcacaccacagactgcagagatagtaatacctgttgtgagaagctgtctggtatccaactgccaaagcctgtctcaggatatcattcaccagctgttctgtagcctacaatggaagatgctgttattcttcaaatggccatctgcttgctggcaagaagggacacatttaaccccatcccttaccccaaatgtttgaaaccactgcaactagggattaaaaagtccttaagaaaaaattaaaggcctcaataatagaccataatgataaaggccatgattctgagaaattatgaattggagtgattttcattaatcagacattattctatttatttatttattttgagatggagtctcactctcgcgcccaggctggagcgcagtggcgcgatcttggctcagtgcaacctccgcctcccgggttcaagcgattctcctgcctcagcctcccaagtagctgggattaccaggcacccaccttcaggatcatgtcctccaccacggacgcatacacgttcctgtggagtgccacgggctgcagggtgatcccaatctggaaaagcagaagaaagccgtttgttcgtatcgctgctttagaaacagcctctctccaaacaagcatacctccctgacatgcaaagcgatgcctggttggaaggaggactctgcaaacatattgggcaaaattcacgggaaaggaacacggaatataacatctagaagaatgttatcttgtttttccacatttctggctgatatttaaaatatgactataatcctattaaaatctctcaaatctccttcgtgggagaacatggttgggatctgcctgggttctgatacgcaatcaacactttgaaaggtctggaatcagactccaacgtcctgtttgcacttggaaactgcatcttgcccattcttcatggcatccaatgaaagcacactgtctttcaccttgggccctgagcaactggcagatgctgaagagctgttaggctccagcagggtggataaatacctctctcctgtatagtaaggcaggtgcacgccatctgcaccacaggcggggcactcaggagctatcaacacatcaggggaggattacgcgctgacgtgcaactcagaaagagtacgacgtgcctcatgagggaaaggtgcttctactgaggcagatgagaaaaacaagatgaagagtaatcaaccatttctatctagccagctttgcttcacgtctgcgttcaacaagcaatgttttcacatgtaattagcatttctgcccaagggctctgatgtgggacggtgggagccctgagagcacacctgggtcaaccaggcagaaggaagtcaagcatctacggcaccagaagagtctgggtctgagtctgtgtctgtgaggctgaacacctgggtctgggtctgtgaagctgaacgtctgaacatctagctctgagctggtctgctgcatgaactattaacaccacaacccctaccttctgtgtgacatccccaataaattcagaccctggggttggtggcaggtagaacttgacttcctcttgtttctcttcctgctccttcttgatgtttatcttcactggctcggagaggctgaggatgtccacctcctcctcattctcgggttcccttttctggaactgttgcaggtcctccagtttgcggcagaggttgtcagcagaggagaatgatgatgggcactctaaatgacaggcaagcagtgttacaacagctgtggggccaacggaagaggactttccgtctccaagagacccatggtctgaggaagggggataagcatcaggggagctgaccttctttccagttctaacattctatggatctataatgatgagaactagtaattcacgagggagaaaggcataaacacaggcatcttgtgtgtgatctatgtaaggtaactgccatctaagatgaaagagtaggaattctcacttctgccaccaaaaaccaggtcatccccctccctctgagtattaaggactgacctgatttttcctcatctcaaatctggaaaatttagaaatgcagagtgaagaaaataaaaagaatcacccctattctcactgctcagagagcaggactgttaa

SEQ ID NO: 773 - DNA, 3135 bp, Homo Sapiens
tccgggtctaccggaaactgcgctctaggcgttcgccccccgcggtccgcttccgggtttgcacgaaattgcgcgcgcatcctagaggccggactggctgggaccagggcgggccgggacaaagcctgggccgggcctgcgcttccgttcgcttgactggctgcgcttgttttcagggttttggtctgaaaacggatcttacctgcgcagagcaaaatcggttgtagattatatccacgaaaattccttctattaaaatgaatttcaagtcccacctaccctggaagcagaaagagagagaagagagagagtaaagagaaagagaaaagaaagagaagttgaaaaagagaaagaaaaccaagaaagaaagagaaaaaaaccgaaaataaatggacaagaaagaaaagtaaggagggaagggaagggaggaagggaagggaagctttaggaattgaattaacacactttggaattgtctgtgaaggggatgatgcaagctaaaatgtgaaatgcaaaaccctgccagggtagaatgttctatttcatgccagtgcccatagaagataaatacttttcatttatcttccccattcactctagacggtgaaggtcaaccctgtgctcaattccagagactttcctagggacatcgtgttgggcatggaggactaaggccagtgtgaagataagtcaccgattctttaaaaaaaaaaagccagtaacttataaaaatagccataaacgacgtagttttttgttgttgttgttgttttgagacagcgtctccctctgtcccccaggcgggagtacagtggcaggcactcagctcactgtaacctccgcctcctgggttcaagtgattctcttgccccagcctccagagtagccaccacgcccggtccaacttagttttttaatactttttaaaattttaagacagggtctctgccaccgaggctgaaatgcagtggcgcaatcatagctcactgcaaccttgacttcctggggtcctgggcaggtgaccccctgtctcagcctgccgagtagctgtgagtaaaggcctgtgcctctccactgtgctaattttctactgtttgttgctttgtttttaatagagatgtagtctggttttgttgcccaggctggtctccagcttctagcctcaagcagtcttcccatctgctcctaccaaagtgctcggattataggcatgaatcaccttgcatgggagataaggacccccacatcaagccctcaggttatttttgaaacacaaatacataaggcccacaagcaggcccattggctgcagacagtggggtcacctgaagaacttttctttgatctgagtaccaacttctcacctaggtcactgggatcctggactacggcactgctccaggcaggcctggttatcctgcttgaggcagcaatcctcttgagcctagtgaaatgcaactggctgtacctcaatgatgttgccctgagattctgccagtcgaggtattacttcaatctcctgagaccagcctctacctccagatccagggaggtcagtgcacatgtaaatggactagctttattaaaggggatatctgggccaggcgtggtggctcacgcctgtaatcccaatactttgggaggccgaggagggcagatcacctgaggtcgggaattagagaccagcctggttaacatggtgaaacgaagtctctactaaaaatacaaaaaaaaaaaaaaaaaaaattagccaggcatggtggcacacgcctgtagtcccagctactcgagaggctgagacacaagaattgcttgaatctgggaggtggaggtgcagtaagccaagattgcgccactgcactccagcctgggagacagagcgagactccgtctcaaaaaatataaaaataaaagggatatctggattggcggagagactgcaggacagcattcaagtggggttgaattggcccagttgcatctgacttctcacttgtagttcccaagaatgaatatagaatgtgctggaaaagcaacatcctgagaggaagggaccggtgagaaaaggacaggatgtgttccagatccccagaacaggatcccctttgttgctttaggccaacgtgccatgcatccctggagcatgaaacccaggatgggccgccttccagcctcccacagctgtgatgcaagttgaacacatacagagagactgcatctgcactgggtggttttcctgagccttggggagcagaatgcatgaatcccaggtatctgccgatctgtatgtaacaaattcacttcatgtaacttactgtgtgtccgtgagattatctctcactcaactcagacacattggcaaccagtgtgcagtgaacctgcttcacaagcaaggatgtggagaaactattttcgtacattttgtgggaatctgaaatactgcggtcagtatggaaagcagtatcatgggaaacttcctcaactcaagatcacctaccaatccttacagaatcagaatcatcatacaaactggtgaaagcatagtttcccctagaggttgggatgagggcaagaatgtcccctcttatcactactattccacacaatatgaaaggttccagccagtgaaataaaggaaaaagaaataaaagtgacaggctgggtgtggtgtctgaggcctgtaatcacagtgctttgggaggctgaggaaggagggtggcctgaggacaggacaaaaaaaatagtgtaccaacagaaaatatgttggttgtgcaggctaatacctttcccaaaggaaggtagctacatccctatgacctgtgttactggatatatcaaaagggagtttgcaaatgtggtctagataaggatctttagatagacatcctgaattatatggtcaaagtgatagaatcacaaggttcaatatcagaagggtgcaggtggatgcgaagggacagagacagtggtgatgtgttgaaaatagagggataaagagattttttttctcacctttaaagatggaggaagtggaccatgagtcaaaggatgtaagtggcctctggaacctacaaagggtaaggaaacaaattctcccctggagattaatgaagaatcacagaactatggacccat

SEQ ID NO: 774 - DNA, 2616 bp, Homo Sapiens
taaaatgtcgaactcctttgtatgtatggatcagttttcagcattttatcctttgcactttcaatgtcatgaaataatctttgattccctttactatgaagttttttgtcagcatcacttcctctgggatatcttcatcctttctgtcgtggccactttcctctttatgtcaataattttgcctccactgagtttttctggctagatattaagagtgtctcaaacagtggaagtatcaacatttccatggtcagctgtttcttctataacaccgttcaattgatcttccctaccaatatcttcatttttagtttctttgctgcattttcatctttgttgtccaattccctcatttgattattcatttttgtaaaatgttatggggatttattacagagagagaaacaaggaggcaacacaagtaactacatattgtgctttctgtgcatgaagtgaacaataggtatgcttcaactaatcactatcactgacacattttgaagtgatgtgactagtcaatgatcacagtgctcatctgttgttttgtactgacttgtgggctgaagagctagcagtaagtttgtgctttatgcagttttcacagtaagtctttgttacaaatttgtatcgccttattgggagacttgttatttaagtaaaccacagtaactgaaattttaaaatattggaaccatcaaatccagacccaaaacattaatacctacacatactctctagggttaaaatatctgagctaaatttatatttaaatttgcaagagacagctttcatacaaatatatccatttatatataaatatgtttatatgtatacatacagtctatgttttcatatatataactaggttatatataattcaattatatataatttatatgtaataggctgtatatagagatatagattatataaataaaattatagctgtagcctatttattggcctagtaaaaaccatataatactacaacagactagaccttcatttgagcacacaagtaagtctgttttgagtgagagcttctttgagtgattctgtgaacttcattgcgtttggtctagctgaacttgacattccttttaatttttctactaacgcgccagctccgatgctccacattcttacaactaactcatgatcagcttttatttctcagatctcctgtaattccatcttaagctcttatttatttggagaccttcaccgcaatatacttttcccagccattaatttcagtattgtctgggttttttgtttgtttttgtagcagattgttcattctgctgattgttgtatattagtttggggttacagtttcttgtatgaatatgtataactctcctactactttgtaaagccagggcagttactaaacatttagcattgagtctggcatgtagtaagtcctcatacatgatagtttctttgtctctttgctgtctctagtaaaagtagctgcacgtatcagggacttatattttaaaattttaattgtaactttggctctgcagtgcccatgtcaggcttttacttgtcaggcaaattgttatggtataccattttctttttctcctttatttgaatctcccctctttaagattttcttactacccttacatgttttagattcttgtttttgcaattgtggattattttcatctctttttagtcttctcctgtctgttctaattctcaaaatcaagtttttccatctctgaccatatgcttagttggcattgattgtacacttcctgtgagtttatgcatttacataaattacactacaatggggcatttttcttattaattaagaaatactagtattcattaaggaattattgctctgtagttataaattctttaagttaaatgcaaaatatcaaagcagcttctgatttttttctttttgttacagaaaaaactcccatgtctgcacattcatagtgtgcatggaagaagagggaaaaatacctttttacagttttggtgcttggggcttattgttattattggtagctggtttatagaaatttgagatatttttgactttctatattaaaatttactataatagtcttacatgaaaatctttagataagcaggaggatttgccaaaataatttttttatcagattttaaggttttgtgtgtatttctaatttttgtttcaattgcttttcctgtctgctttcaacttagcatgagggcttcctatctaatatcaaataaaattatgttaaatatgaatatattagatacagattgtaggagggggggatggttaagtgaggtatcctaattgatctatacttaactctaaattccaatactctacggcaataccatcaaatgacagtaaaagttgtgttatcacttcagtgaaatcatttcttaacataagaagactgattttgacttactagttttagaataagattaagtaagaagacttaaaggcccacctttgaactcataaaaagcctggcctagtgaaaaagcatattttactggtttgcttgcttaaaattatttaagactcatattttaccttggagatgattttgcctataaattaataaagatgtatgtttctgg

SEQ ID NO: 775 - DNA, 1653 bp, Homo Sapiens
acgctaggggcctggcagggggcagcaagagaccgcgatggcctatatacatatacccatagagtatattgaatatttttattcaaccctatgaggcaggtatcatagttttgcagatgaaactgaggctcagatgaattaagtgactgtgtgtcttcgtccatttttgtgttgctataaaggattacctgaagctgagtaatttataaagaaaagaagttcaattggctcacagttctgcaggctgtacaggaagcatggcactgacatcttctcagcttctggtgagggcctcaggaagtttacaatcatggtggaaggcaaagggggagcaagcgtctcatgtggcaagagggaacaaacaggagacaggaggtgccacacacttttaaacaacaggatctcacaagagcttactcttacaaggacagcaccaagaatatgaggaatctgcccgcatgacccaaacacttccctccaggccccacctccaacactggggattacatctcaacactggatttggaggggacatccaaactatatcaaggctgtacaagaagcttggtgccagcatttgcttctacgcagagcctcaggctgcttctactcacagtaaaaggcaaaagggcatgcaaagatcatgtggcaagagaagaagtgagggatgggggatgccatgctctttttaacaaccagctctcatgggaaccaagagggacaactcactcattatagcaccaagcctgtatccctcccattatgccctacctccaacatcgaggatcaaatttcaacatgaggtttggaggctcaaatatccaaacaatggcattatgtcaggatcataaagctaatgtttgtgaaaccaggatctgaacccaagctattgcttctagaacctgtactcttaagcccttgcttatactgcatttgaaattatgcttcattgtataaaaagtccttttcacctcaagcttatagagaagtcaccttgttcttaaaaagtcctttacacttcaagttcataaagctcaggcacatatattttcttccagtacgttcattattatttttcttggttttcctttaaatctttgaatcatctggattttattttggaatgagaaatgaagtagaaatttatttttgtttcttttcagaatggctggtcaattgtcctaacatcatttaatgaatagtatttatttcccctttgctttgaaatactactttatcatatactaaattataaagtaatcttttattatcatttttgaatgactgcattccagttgtggaagatattactcaaagtctgttgtgattatctaacttaagtgttgatatgaagaaaggaaagtaggtttcagcctgatttaagaattttcctcctctccctctccctctccctctccctctccctccccctccccctgcccctccctgtctccctctctctctccctctctttctacgtctccctctcttgccgagcctggactgtactgccatgatctcggctcactgcaacctctctgcctcaggctcccatgattctcctgcctcggcctgctgagtgcctgggattccaggcacgcaccaccacttctgactgatttttgtatttttggtggagacggggtttcactg

SEQ ID NO: 776 - DNA, 2375 bp, Homo Sapiens
attctgtactagatcaggagagagaatgttggttcaaatctaagatgcagagcagattggttaaggactaagttagttgatcatttcctaagacaagactaggactagcagcaaaggtggtatggatactatcaagatgagaggagaagtggacaaactgaaaactagttcaaggtctaactttacaaacatgacctacccactgtggcatccctcttacgcttagcctgatgtgctttggtagaggaagcaccacccatatgagtctgcatttgccaaaggtgccttagaagaaagggaaagaactggaacaggtcagcaagtcccatgctaatgggactcatgtcaagctgggtcaagttggggtgtagatctctcattgagagctaaagcatggcgctaaaataagggaaagcagagacatagaaaacaatcaaatctgaagaaaccagaggatggagatggaggctgtagaacaaggtgggaatggaagctggtggagaacaataaggtaaggacctgatcaaatccctcaaccatcaggggttgctgctggtttggatctgtggacaagtaggactataaatgtggcttgatctggtgggacagtttaaaataccaggaacaggaaaaaaaaaagatatactttgcagaccacctttctaccctaacataggaaagctttagtttctctttcttatcctggtttacccaagaatgaacttaatggttccatgaaaaggatatgtacagtttctgttgatctaaaatcaagtcaggtttagatgaagtctctaaagagcctttgtcacacttagaactccaaccatgtgaggtcagactggggaggctaggggaaggcaactagggtttacaggtctctctaaaatatgatcacttaccctttcctcaccatgcagagccttagttaccaaagagtaggaaaatggccacgtgtctgggttgccacagaagaggatttgtggcttgaatcctattaagaggaactgagaagtcataagcctatggtatagatttcattctcttagtccagggaaaacaatttaagaagggcaagtatcaacctccatgcctttatttggacctcccaacatctctttcaagtagatgacatgatccacttctccccaaacaagtgcctaataatgagctttagaccattctctcaggtacaatgtcacaaagacctcctcagacatggaaaaggggatggggcaaggagagaacagctgttctgtagacaaccagtagtgcctgttgctggggcgattgggctgtctttttgatttatttcccgaatagaggcaaactcacatcatttgaaaggcatcttaggagatgaaatctgcctccatgagatcatggatattgttgatgtcctagctcaggagtaagcaattccattttaaactcttgctgtgatgtgactctccaaaaaacatttcctaagttacatgtaaaagcaagtcattaaaaaaatgcagcttgcttttatttctatgtttagcctgcagttcatcaaacctcaccctctgggctagcagcccgcaaatatctcatagcacttactaaagtgtgtaatgatttgatgaatttgtttatttctctgcctctccctccacctttactgtaagattcatctgtcttgttcaccattctatctgaagcatgtagcaccaaacctagccatagtagtcattcaataaaaaggctgaatgaataagggaatgaatgaaaattttggattggtaaattgcaaggcctctctttagagcagaagagacacctagcactagcaacatctttaccaaatttttattgaacacaaaggactatttttaatgcttgcccctgtaggtcctgctgaggatccctggtgcccagtagggaacaccgtgaggaggaggattaagaaaggcaccctttccactgatttgcatcgccatttgtacatggagtttggctacagcaaaatccgttgctatctcaccagctacaagaagcaaagaacgaattgcaattcatttttgtgctctaggacccggttgagggtaagagaaaagaagtcttgtctttccaattctccagggatctcaaactcctcattttttattgctgtgtaccaagctcccagaggtgacttaaaatgagctccatcctgaaacagatgaaacactggctgcataagtactgccccagcgttaagatgtgtggtctttggaccacttttcctcctgggcagaaaagcagagtagagtcctagtgaatgtgagaggatgaaagaatgggagggcttcagaaaggtactagccaatcaaggctctgatgatcatggaatagttatatctgttcag

SEQ ID NO: 777 - DNA, 1605 bp, Homo Sapiens
ttttataattaaaatgtttataattacatattttataattaaaatgtttataattacatattttataattacatattttataaagtatttataattacatattttataattaaagtatttataattacatattttataattaaagtatttataattacatattttataattcaatattttataaatagttaaaaagacgaggaaaaaattaaaaagacgaggttattgatctcaggaattgtatttgccaagtgagaaggaaaaaatattcacaaaggcttgtacatactttgatcctgaggaacacctctggtgtcttcatgtgccacatagtcttcctcactgactgtctgcctttgcaaggcaaggctctccggtaggcctcgagatgaaataacaagtcctttatttcactcagcctgccaggagtggagaaggaatggctagggagtcctagccccaggggcttcatggcaatacggaccccagatgtctccctggagctctgccaggatccattcaaggccaagaaagtatgattgggagaggaggggtggagatgtagattcctaacaattctgtgacccagcatacatgtatgctctttaggctcttaagcatccttatttttccaaatataatatccaacaatcccaagtgtagtaaaaacccaagggtttctcctgccacatccactcacttcaaactctgattttaaacactggcaatatccagtcagagcctccaagctgagctctagaaagagaaagctgcaaaaaacctgtgcaacaaaacttgcactcatattactgacaagggtagatataaaacagcgcattcttttccatgacactgaagagcaaagaagagtgtaacttgggggcaataagaaattggaggtcaccacctcccaaatcctacatgaggtctatttggaaaagacctccttttttaattcaaaaatccttcaacctccaccattctttcataaagcttcacattctcttggtgaagcccactgttaaaatgcacaggcgttacctggaaaaggaaacacatagccttaacaatattcttctgtactgaactgaagagtgagaaagagtctatggagctataatacggtagtgtatgaatctggtactcaaggaaagtctgttggataatggatggatggatggatggatggatgggtgggtgagcgaataaatgagtggataaatgaggggtcagttttgagagtgagagaaacatggaaattagactcaaatcccaaggcaccacatggaatagttccaggaatagttctgcaagagtttccctgatgagctataagcagcaaaaatttagtgagtgttcaaactgaaaggaggcctggaattgtggcttaatttggagggaaagagggagtccaagattcccagtgcttatttgttgatatctatctagtgctgaaaagaaaaaaaaatagccacaaatccaaaatgattgtgcagtcacatggtacccactgcccagttccttgaccagtgtccctcatacaaagggcccctgatgagctcagaatgtctttgttgtactgaataaagtttgaagaacaaggga

SEQ ID NO: 778 - DNA, 10376 bp, Homo Sapiens
attctgtatcaccctcgctcaaggacctggactgaaggatttctgctttcaagaagaaaaaaaaaaatagaagacatgtttactaatacactggtaattatttctattcatattttattggccaaagcgagtcatatgggtatacaacataaaatgaggtgcagaatttcaatcctatcatttgcttggaaggtggagagtcatatttggagaacatgagttctataattgttggatgtaacagtctatacatgtccactaagtcaagtttgctaatcgtgtttaaataatctatatccttactcatgtatctgttcacttcttgcagttttgtcaatcttagttttatatttttgaagctatattatgtgtacaagttttataatcattgtactttctcatgagttaaactttttatcattatgataatgctttttgccttaaagtctactttgtctaatattaatatagataacattaatttttgttaatatttatatttttccactttttaatttcaacattataatacaaatgttttaggtatgtttcttataaacagtatgcagattgttatccaattcaatctttgatttttaattgaactatttaatttatttacatttaatgtaattactgatatatttgaatttaaatataccgtcttcttaagtgttttcaattgtctcacatgctctctgttctctttatcctcactttttgcctgcttttggaaaatattgtttttgcctccattgttttggaagttacatatctttttagtagtcttttagagtttatcctatagatcacagtatgggtctctgagttagcaaaggctaataatgttaattggcactttcattttcttccataatagtacaaggaccttagaacgtttcaattcatttacttcctctcctgatttgtatgcacttttaatatttttaattttttaaatcttcagcactgtgttacattgtttcatacggtataattcatttagacttcctcaaatggaccttcgtgctggacctcatttctttctgcatctatataacctatcatccttaatcatcttccttctgcttaaagaacatcctttagtatttgatgctggtaaagaatcctgaaaatgtcttaatttcacttttattattgaaggctattttcactggacatagaattctaatgttgacagttattttatttcagcacttgaaagacatttaaattccactaatttctagtttccattgtttctatcaagaggtaagctaacagtctattacattttttcaagtaatgacagctgcttgtaatttttttttccctttgtctttggttttcatctgtcttattgtgatgtacctaggtgtggcttttaaaaatttctcctgcttgcagctcccagggcttctgagatttgtggcttgttgtctttaatcaattttgggaatttttcaactattttctcttcaaatattgatgctgcaccattctctttctcttctccttctgaaattttaattctcattttatctccatatctcttactctctgtagcattgctatccttttgtctctccatgtttcgtcatgatgttgtcttctaacctactttccagttcatcaattttccctacagctgtgtataattttttgttaaaccaagtaaagagtatccactgagctctttgcttttgttagtatatattttaaattctaaattgttcactggttattttttacaactttttcatccttttttaaagttttcagttctctgccaaatttgttgatactgtcttttatctccgtatgtgtagtaaacataattaatttaaagtccgtatctgataaatccattaactggagttctgtggtattgtttctattgtagttgtttctactggatctcatgttttcttatttctttatgggcctggttattctcttgtgtgctaaaattgtatatgaaaaattgttggttgaagtaaagtaaaacttattgtgttatattcctcctgagagtacagtcatccctcagtatccacagcaggattggttccaggacctactgcagataccaaaatccatgcagatttcatttccacaatcaaccctgtggaatccatggatataaaacgtcgaccctccatatataagtgagtttggcatcctgcaactactgtcttttatatttatgtttggttgcagatgcagaattcaccaaagcctaatccagagcaaggccctaactcttcaattctatgaaggctaagagagctgaggaagctgtagaagaaaaactgcaagctagcaggggttggtttatgaagtttaaggaaataaaccattccgtaacataaaagtgtaagataaagcagcaagtgctgatgtagaagctgcagcaaattattcagaagatctagctgagatcatggatggcggtggttacactaaacaacagagttccagggtagacaaacagccttctattggaataagatgccatctaggactttcatagctagagaagagtgggctgactatatttattttaaaaatccatgtataggctgggcgcagtggctcacgcctgtaatcccagcagcactttaggaggctgaggcaggtgggtcacctgaggtcaggagtttgagaccagcctggccaacatggtgaaaccctgtctctactaaaactaaaaaaattagctggcatggtggcaggcacctgtaatcccagctactcaggaggctgaggcaggagaattgcttgaacctgggaggcggaggttgtagtaagccgagatcgcgccattgcactccagcctggatgacaagagcgaaattctgtccaaaaaaaaaaaaaaaatccatgtataaatgagccatacagttcaaacccatgttgttcaagggtcaactgtatttatatttgcttttgcaagatacctggggatgtgaggacctgggatcacctttatccaatttgaagaattaagctaattggatctcagctgaggccccacaaaatctcatctacttccatccaagtcatcctgtcttttctcttttttaaatttttttggaggtggggtctcactgtgctgcccaggctggacaacataggtccagtggcacaaacataggtcactgcagccttgcactcttgggctgaagggatcttcccaagtagctggggctacaagcacatgccaccatgctaccatgctgcgctaattttttcattcagtcttaagatgaagactttcagggtcctagcctgctatggggagttatatgtctaccctctcctttggtgagcaccggattccaacttgtgtttatgtggccacacaaagctgcccaggtgctgcttagtctcttcagttctttttttttttttgagagggagtctcactctgcactgtgtcgcccgtgctggagtgcagtggcatgatctcggctcactgcaacgtctgcctcataggttcaagctcctccgcctcctgggagcctgggtgattctcctgcctcagcctcccgagtagctgagattataggcacccgccaccacacccagctaatttttcttttgtattttaatagagatggggtttcaccatgttggtcaggctggtctcaaaccctaacctcaaatgatccacctgccttggcctcccaatgtgctgggattacaggtgtgagccaccacacccggccatctctccagttctttgttgtcgtttccagaagcagcaaatgtcccaaggggaaaagaggcccagttattgggcttgcctccttgaatacccatctttctccagctcttcattggtgattcttcattatctttttaagtctgatgttttcaagcacattttattttaattttttcccacttttctaattgttctcagcaggacagtaggtctgaatttagtctgctattaccagatggtaggaaatagacaggtatgcttcattttgtcatagtttgctttactacactgcagatattatattttttacaaattggaggttcgtggtaaccctgcattgaagaagcctttaggtgccatttttccaacagcatgtgctcactttttgtttctgggtcatattttgataattctcataatatctcagactttttcattattattatatttgttatggtaatctatgatcagtgatctttgagattactcttgtaatcattttggggtgccataaactgtgctcatataagatggtgaagttcattgataaatgttgtgtgttctgacttctccaccaatcagccatttcccatcttttacattcttttcagtcctccttattccctgagacacaacaatattgaaattagactaatcaataaccctacaatgtcctctaagtgttcaagtgaaagcaagggtggcacatcccacactttaaatcgaaagctaaaaatgattaagctcagtgaggaatgcatgaggaaaagccaagagaggccaaaatagagggcttttgtgccaaacaggtagccaagttgtgaatggaaaggaaaagttcttgaaggaaattaaaagcactactccagtgaacacacaaatgataagagagtaaaacagccttattgctgatatggagaaagtttgagtggtctggatagaagatcaaaccagcaacaacattcctttaagttaaagcctaatccagagcaaggccctaactcgcttcaattcaatgaaggctgagagaggtaaggaagctacagaagaaaaattagaagctagcagaggttggttcatgaaatttaaggacataaaccatttccacaacataaagtgcaaggtgaagcagcaagcgctcatgtagaagctgcagcaagttatccagaaaatctagctaagattatggatggtggtggctacactaaacaatagaatttcaatgtagacaaaacatctatcagaataagatgccatctaagactttcatagctaaagaggagaaagcaatgcctggcttcaacgcttcaagggacaggctgactgtcttattaggggctaatgcaactggtggctttaagctgaagccaattgctcattttccatacagaaaatctttggacccttacaaattatgctaaacccaggccagacacagtggctcatgcctgtaattctagcactttgggaggtcgaggcaggcagatcacttgagctcaggagttcgagactggcctgggcaacagggtgaaaccccatctctacaaaaaaatacaaaaactagccaggtgtggtgaagtgtgcctgcagtcccagctactcaggagggtgaggcaggagaatttcttgagcctggaggctgaggttgccgtgagtcaagatcacgccattgcactccagcctgggtgacaggagtgaaaccctgtctcaaaacaaagaattgtgctaaatctattctgcctgtgctctataaatgaaataacaaagcctgaatgacagcacatctgtttatggcatgtttactgaatattttaagcctaccgttgagacttactcctccagggaaaaaaagggattcctttcaaaatattacttcttgttggcaaatgcatctagtaactcaaaagctctgacagagatgtacaaggagagtaatattttcatgcttttaacacaacatccattctgcagtccatggatcaagaagtcatttcaactttcaagtcctattacttaagaaatgcattttttaaggctatagttgtcatagatagtgatttctctgatggatctgggcaaaatcaattgaaaaccctctgcaaagaatttaccattttagatgcccttaagtacattcacgattcatgggaggaggtcagaatatcaacattagcaggagtttggaagaagttgattctaaccctcacggatgacttagaggagttcaagacttcactagaggaagtcactgcggaggtgctggaaacagaaaactagaattagaagtggagcctgaaaatgtgcctgaattgcttcaatcttgtaacggttaatactgagtgttcacttgattggattgaaggatgcaaagtattgttcctgggtgtgtctgtgtgagcttccctagttttgaggttttgggacttggactggtttccttgctcctcaggttgcagatggcctattgtggcacttcgccttgtgatcatgtgagtcagtactccttaataaactcccgttcatttatacatctatcctataagttctgcctctctagagaaccctaatacaaatttcatgataaaacttgaacgaaagaggagctgcttcttatggatgagcaaagaaagtgatttcttgagatggactctactcctagtagagatgctgtgaacattgttgaaatgacaataaaggatttagaatattccgtaaacttagttaatacagaagcagcagcatttgagaggactgactccacttttgaaagaagttctactgttattaaatgctaccaaatatggtacagagaaatattttgtgaaaggaagagtccattgacatggcaagcttcattactgtcatattttaataacttgccacagctacctcaaacttcagcaaccaccagtctgatcagtcagtaaccatcaatatcgaggcaagaccttccaccaggaaaaagattataactcactgaaggctcagacgatcattactatttttttagcagcaaagtatttttaattgaggtatgtacatttttagacataatgctcttgcacacttactagactacagcatactgtcaacataacttttataggcactgggaaccaaaaatttgtatgattcactttgttgcaatacttgccttactgcggcagtctggaaccaaacccacaatatctccaaggtccacctgcaaatgcaggcagtgggccaggtatacatgcatacatatgccttatgtgaggggtgggcactgaggttaactagaaagcatgagcctatttttgccttgtggtaataagggcctcatattgccaaatttttccatttttttcaaaagaagtaggaaaggaaatgcaggcttttaaaatgtgaaatcccaattttcaattgttggttcaaaaaaaacttaaatctcaactagccaaataaaatgcatctggggtccacacccagctaccctataggatactaatttaaaatatctggactatagtctatattgatgagagaagtggggtgaaacttggcattcccttgccattaacttctagcctcccagtagtccaggctgccttgaataaacaccagaccatcatacaaaacagagtttttatcttatttatttatttatgagttgggtgtcttgctgcattactcaggatggagtgcagtggcacaatcatagttcactgaggccacgaactgctgtgctcaagtgatcctctcacctcagcctcctgagtagctgggactacaggtgtatgccaccacataaggctaattttaatttgtttttgagagacagagtcttgctatgttgcccaggctggtcttaaactcctggcctcaagcaatctttccaccttggcctctgaaagtactaggattatagaagtgagccgctatgcttgaccaaaacacagtttttaaatcaatttatgtctttactgaaatctcttaaagatgccaaagggtggggtttgggttccattcataacaccaacatttctgaagaatcctcttctcttgtctctttctcaagtcctcctcatgacatctgtgttagtccgttctcacactgctatgaaggactgcctgagactgggtaatttataaaagaaagaggttttaattgactcacagttccacaggggtgggaaggcctcaggcggaaggggaagcaaccacatccttcttcacatagcggcaggaaggagaagtgccaagcaaaggggaaaagcctttcataaacccatcaggtctcatgagaactcaagaagagcatggggatatgtggaggaaaagttaaatcttaaatttgaactcaattgaatgtggacacaaacaatggtcaccaagtcccagaacaggttgcatgagccccttgaggcgttcatccagacggttttggagaaatctgttcctgtatgttagttattgaaaaacaacaaacaatcataaaaacaagttgacctttttgtgttccttgagtccagtcatgaagggccctcgtgactgggcctcatgccaaataagtcgttacaaaaagaactagggtcccataccacgccaaagcttcatgagacctctcctcatctgtgcatggatgagcggtcaactctggagcccaggctgttgcttccctgtctggtgatgaatcctctatagtctggtaagtgtagtggccgactctggagcccaggctgttgcttctggtctggtgatgaatcctccatcgtctggtgagtgtgtgtgtatatatatatagtctatattgatgggagaagtggggtgaaagttggcatgcccttgccattaacttctagcctcccagtagtccaggctatatatatatatcttctcccttttccccttcccattgcaatttgcttgtatcatttgcttattatatctgcattgccatttacatgggataaaggttgtttacccttgaaggtattgcatgtgtgtcttttcttttccctttgtgcatctccctcatagaaaagagtaaccgcccccatgattcaattgcctaccactgggtccctcccacaacacgtggggattataggaactacaattcaagatgagatttgggtggggacacagccaaaccatatcaacagcccagcagctacttcagtcctccttaatttatctcttgaattctcccaaacccagctcatccctggcttgtttctcttattctttctctcgccttctgatccattctgctttcgttagtatgtaactccctgccttctcttaggtagacccatcaacccatcctacccatggtactgcacaattcagaatcctttcccaaattttcccttattatgcacaagaaatactccagggccaggtgcaatggctcacgcctgtaatcccagaactttggaaggctgaggcaggaggatcgcttgagcccaagagttcaaggctgtagttagtgatgttggtgccactgcactccagcctaggcaacacaacaagacactatctcaattaaaagaaaaaaaaagaaaaaagaaaaagaaatactccagaacttggctagtgaagactaattcctccttcacaggaaggaagtgggggcaggggaaaatgatgctgtaaatactctaaaatatgtattttttcctgtcccatcagctatgccatctgggatggggtgacgcctggatgagatgtcattttaaaggacatttctgggacatgctggcatcaaggcaagttttcaggctggaagccatttgggcagaggcagaatctgggctcagagtctagccctgcaggacccagtgtggcagctgcgtgtctctggagcactggagagggggctactgcaaattaagatctgctgtaaagagcatcttcctggttattctctgggacgcaaaaccatggtggtatctgatctcatcacacttctgccaggaggtgaaatcgaagaggctacattcttgatgctcagtgtcttcttcaggtcatttgcctgaggacacctggggatactgagccctcacagagcttccagtcctccatgaaatgcagggttgccgcctgaaaacagaccaaagggggcacacgacatggttctgacagcatgggtaaatacaaggaagctgggagccgtgcaatgctgcacacgtcccctccccggcttcatctcccattccctcccacccagctgctgttgcagggccccctgccttctttttcactctcaacagcacaccctcagtttgcccttgttttcatttccttttccccttacctcccatacctcttttccaatctctccccctcccgttctggttttgttgtaaatcacaaaatttcaggaacaggcccagcaaggacagaagccccaaggggcaggggaaaaggagagaaactgcatagataagaacaggcttcttctcagagtaaagactaagaagacacagccgtactgtaatagtagttacccttgtccgaagggcagtgcaagcctggaaaagggagaccacccgtgggctagggagtggggaagaagctcattagggtgtctggacacgagctaaaccttcacagggcacggggacttgggaaagcagaggggacggagaggccatgccagccc

SEQ ID NO: 779 - DNA, 2529 bp, Homo Sapiens
tcatgatccacccgcctcggcctcccaaagtgctgggattacaggcgtgagccaccgcgcccggccgagtccaggatttttaagggcttcagaagggaagaagtgcatgccgattggcccatgggcagccacgggcaggccagaaaaagcaccataagttctcactctgggccgcagacttcacccagaactgacagctgggcccccatacttcaggccatccctggcttgaaagtggtgcttcaccgggacctgcccctttctgctgagaagcctgtctgcctcctgccaccatcaatcatgttgtccatggtgcccaggctgttcctgcggaggagctcctgcaggccccaccaagccaccctcagcccctgtggcctccctcccgtgctcgattgcacccaaagtccaaatggagccaaagtagcatagggctggtgtgtcagcaccgccccaagcgcacgcaaacctggccgagtggcgatagtgcccaggctcagcctcaactttactcggaaataggagtgggcgccaggagcagggagaagccaggaagcgggagcaggcacttctgagcctgcgaagacagggaggcttccccggctcaagagcacagggatgcctgggtctgcagcctcggctctctgttgcagttgtgcctgtgagggctgggttcccaccccaccaactcagaaggggccagggctcccgcctgttcccagctcctgctggctgcatggaactgcagccctggccacgcctccctccactgcaagccgcatcttcaaagcggccgctccagacaggctgccactgccatcaactgggacaccccgaatgcttacccgaagcagagagattataataacacagctctactgggacaagtaaaagcagacatcgtttcctctacataatccaaaattagaacatttaaagtgtaagaaccctgaattcgtgtcctttttctgctactcattagccctctgacttcagtttctcctttttaaaaaatgggtaaaataatgtacctcccagagttaaaatgaggtagatccccaggggcatctttcccacccacctatacaggtgtggaaaggaggtctcaggtaccagcagtcagtcggcagcttcaatctttatgcttcaaatagcattgatgttggtgccatgagaaatcagaaatgatgaagatacagtatctgtcctcaacaagttcagaagcagaaataggagctataaggaaatcatccctaattcaaatcagaaagtgaggtatgccaacacagtagtgtaatcctaatctttattgtgttagaaagttcctcaagacgtagatggaagtccataccccaggagaattactcataaaaatgaaatttcctgttttcaaaaatgacacatatggtataaaagtggaaccacacatggtgatcttactaccctggggggtgctatgtaaatgggccagggatggtgtctggacattttcctaaaattgctcctatgttctttatttcttcacaggcagattagggcctttagcctaaagcttgccaataccaaattcagattcttacacaaccaattgctttaaatattaaaaataaaatccaaatatctttaatttatatttaagtcttaaaaatgcaaaatcttttttaaaaatcaaagtaagcatatatttagccatttagaacctacctactttgcgtacctcacaaaactacacccaacatctgcagaccatagaggagacaagccctgcagctgctaaagaccccagacaggtgctgcccttcaaggctgtcagagcccccaccttgctgctgcgcaacgtgatgtagacaggtggtccctctttggttcccctctcccctgggtgaaggcgtcacaccactgtctctggaaggtctcctgctggaagaaacttcccccctcacataaccctgtccacgcaccacccaagaacacttgttgtgtatttactgcctctcacagtcgtatttcttccttgatcgaccctgaaatccttaaactggccatagagagcaaccaccatctaatggaatatcaagcccttgccaaatggaacacagtttttttgggttttttgtttgtttttgagacggagtcttgctctgtcgcccaggctggagtgcagtggcgcgatctcggctcactgcaagcttttgaccttctcccctgagtctacaaatgtccaagagatatttcttctatgatggaaatattatatgtctgtgctatccaacatggtagccactatcaacactgaggacttgaaatgtgactagagcgactgagagactgaatttgtagttctatttaaatagtcccatgctaccaaattggacaacacagctatatataatttgtacattcacatgctcctatgctattctttaaccatactggttagttttccttgctctctctcaactacagctaaattcctctcaagtcttagagcttttagactaggagcttaaccagtttaatttaaataac

SEQ ID NO: 780 - DNA, 2280 bp, Homo Sapiens
gagtggctggacttgtgtgaagcgaaggggttgcaagacgctcccccttcccttttcttttttattgggggtggtggtagtgtttgaggacattgcgtcacctctcttcggggtggagggggggaatctctgcttataggagtgtattttgtgaggaagaaaacccataaaatatccacgaccttgcagctgttaagaatccagacttttcagtcccagggcggggctgcctttccccccatcccgctccctttctttggactaaagggaaagccttcctttcctggggatgggacgcccgtttccactgaaagtgaaatcactgtgaacaacctgaaaattggaaagttggaccagctgtggggagagaaaggtcttcgtgtcctttcccacgttcaccgtgccagttacacacaaagcagagatttttttgcttgaatcattaaaagccgggtgggtggggggcaccctatgtactgtcttgccctccttcggcccctttctcacatttatttgccattttctttttgctgacaagttccattacagaatgccccctccatcccccgccgccagattttttatatttcaattgttatttactccaagagtgtggaaagttctcctttaagattcccccgccttgaactctaaactcagagtggaaagggaatctgaaaagtctctcatttagcaacacatcacatcagtcctttttgtcagataaacacaggcacaattgcttttaaagatcttcagaaggaggagtccaccacttccacagtagatccagagagacccgaactgaatgctttgccttctccttgtgttaggagttcagaggttccatttgctttaaaacacaagaagctactaataaaatatatttatttcggcaaggtacctattttctccaaaagtttcaccttcagtaattgccacaggagtaattagaactctgtgttctataaaatgcctgacacattaaagacacaaaattagcatttgtttttattcatgcaaggatttaaaaccaaaccaaaacaaagcaaaacacccagcaaatatcagtttcctacaaatagtgtaaaaaaacctcttgaggaatctttgtgacccacactccaaattgaaagagtgccatggatttccccaaatttagaatcctgtctgggttagaggatttttttggaatttctcatcacttgacaaaacagttttctcttttcaaatataaaagagctccttgtaaaatgcttggtaaatttctgggaagccgagtgtttcttccagagggaaggatacctggaaatccggatgtaagcaagataaacctgtagctaaagctttcttaaaattcattgattctgggggaaggaaataagtgattagaaaagtatttggtcaaccaaaaccatgatagtttgatatatttactgcactgaaaatacactagaatcatatgcatagtggagcttgaagtggaaagcccaccttacattttggaagaaacttttatatttcaatcccatagatatctaatttatttaaggaaacaggatatctctgtctcataagaaaaaaaataacatctgactgatttttataggaatgcttgggagtttactcttttacttgaaaggttttttttttttttgcctttttttttaaactttagaaacagaggcgtttcttagttaagataacagggcttactacagtattctttaattatcaaggtcccttgtaactctaagtctgttatctctaattggagagataattaaatcttaaagaccactctgactctaattcaaccaacgtgtgtggtgtccaggatcgttggacttccttaagaattctattttatccaggtgggttcttcctcagtaaattgtattctcctattggtaggaaatactcttggatttctttctttctttctttttctttctttctttctttctttctttctttctttctttctttctttttccttctttccttctttctttctaaaactgtattcagagagagaaatgtgacaaaaaaagggaaatcaatagagacagaaagtagattcatgggtacccaagtttatgggctgggaacaggaattaactgtaaaagggcacagggaatcttattgaggtgatggaaatctgtgttctaaaactacattgcagtgatgactgtacaatttggtaaaagcttcaaaattctggggattatacacaaaatgagtgaattttacggtatgtaaattatgcttcaataaag

SEQ ID NO: 781 - DNA, 986 bp, Homo Sapiens
tttgcaaatagtaacgacaaagatgatcaagttttaaattgccatttggcagtgaaggtgctatccccggaagatggaaaagcagatattgtgagagccgctcaggacttttgccagtgagtagcccagaagcaaaggagacccaaagatttggatgtagatatgttagtttactcagttcaaatggttgtcctgatcctgatttagtactgaagttcggtcctgtggacagcacacgaggctttcttacctggcacatcagattgactgagattgtctctttgccttcccatctaaacatcagttatgaggactttttctctgcccttcgtcattatgcagcctgtgaacagcgtctgggaaagtcgtggtcattggttgcataattccatttgaggcttatggaggaaaggacccaagtgactctgatgtttagaaagcacctatgaaaccctgtacacacctagttcataatcttcataatttatcaacaaacaaaaaagtgtcttacttgagagtgagtgtgtgcgtgtgtgcgtgcacacatgtgcacgtttgtatgtgtggaaataaacataaatggggacgtgttggagaaggaaatacatagacctacaactttgagcatatagcagtgatgttttaggaactgaaatgtcacacttaataaagtcttcagcccagctacttccctgttttcgtggggagaagagggcctgattagaactgttctggttgtgtttggcgggaggggaataaattttgttcagtccttcttagtgaccaaactttaatttttaagaataatatattgacttactgaactgaagcattctgagttgaaaggagctccagaggaaaggagttctgtgttgctcacatgttaaaagcttgctcaccttcagagcagagggaatacctatcttcagatatccgcccattttcatctcttcattatagtcaaacagtgtgacttgagagtgttg

SEQ ID NO: 782 - DNA, 5178 bp, Homo Sapiens
gggttccgaggcggacctggggagcagaaacccctgtttagggtgaaccgtggcgggcgccgatggcctcttggaagaggacagactagcagctgcgagggagatgggactgggtttcacccctgaaagggcccctggagacagcggggaaactgacagggagatcatgatgtcgccattttgatggggtccccagaggagagatgtcctccccaacggctcctggacaggactggggaaagagttcaggagggctgctgaacgccggagccttacaactgttaaactcaggcagagctcgggaaatgctgcccggatgggtgagtccttttaacacctcttgggttgatttttctcacaggttttcggggtttgcagagctctgagactgtgaccacagggtgagacctcaagctgcccagtactgtggccccatttcagaggccttgggcctgggccagagatggacgctggggctgccttttactccaagtttttttcttcattggtcattggtcattgggctccaagaaaagcactttttcaggaatcaaagaagcagtgatggaacgaaaagcagagaaagctgatgagccctgaatggaggtgaaacttccaggaaatatcacttgcctcttgattaggggaaatcacttttgaatgaccccgagttttgtgccccaagcatagattctggcagaaagaaacagtctggactgatgacacactacaacatttggtcatgtggaaagaatgatcttcaggaaaaatcacacccttggcaaaggctttttacagaggcaagggcgagccggccaattctgacaatattccagtggcaagggagccaggctgactcagtcatcattacttgtgtttcgtctcttcctcccacatctccttgtataactgtcttttggggaggggtgaagtgatagtaagaaaaacaacagcactttgaaaaagggacagggggagaaacaagaaggggagaaagagttggggagagctcttgggtgatggggagatagcactggggatgttctggagcctgacagaactgtgtggtccctccagctggagatgctgggaaaacaggaagggattcgggagacggcagggatgaagttggctcatgaaatgcagggctcccttagcactttacaaataccagcttacaaacactccacagtcatcaggaaacccttgatggatgctgcacagagatcgaagttcaggagcagcaccaatattcatccggggcaattggagtgagagcagcacaggatcacagcctgatttggcctcagaggctttcttatctcttgcaagatctggaagccatgcaaaaggtgtcatggggagaggcgctgatgtcaggcatttatgggaccactgagtgggggcaaagaggcaggagaaaaagccagtgatgatgggtcgacacctgcaggtagacccatttgcaggttattagaaactagcttatttatccagcttttttttttttttttttggagatggagtcttgctctgtcgcccaggctggagtgcagtggcgtgatctcggctcactgcaacctccacctcccaggttcacgccattctcctgcctcagcctcccaagtagctgggactacaggcatctggcaccacgcctggctaatttttttgtatttttagtggagacggggtttcaccgtgttagccaggatggtcttgaactcctgacctcgtgatccacctgccttggcctcccaaagtgctgggatttcaggcgtgagccaccgcgcctggtcctccagctctctttttgtggttatcttagacgctatgaatctacttgaaaaccaagacgattgatcctttaagtgagctgcaggtgtccacctgggcgtgttttctgcttctaagccacaggcaattcggtgtgcaagtttaacaccctgataggccctagccttagctctgttttaaactcccaaaaagtgtttttgtgtttgtgtgcatgtgggggagacaccttaaaatccagcaatgctgtgtccacagtgctctcctgggccccttccaaagatgggaataatatgggcagctggtttcgatttttataacttgcaacagctactctgtgaaagcggtgtgcagcaacagccaggcaatccggacagacttattaaatgtgctgggcactgggcactgggcactgggcactggaattctcctggttgtaggcaagctgggggacagggaggtgagagctggaatagtcattctgaagtgtgatatttattggaccccatactaggtgactgatggagaggggctaccactcttccagctaaactccgctctggttgggacccagcaattattttccatagcgaagtgttaataaaatatctgttactcccaacacaacctcctgggggaagggacctgtctgtctgcttcaactttggatcctcagtgcccacatcaggatacctggcctgaggtgagtgctgtagaaatagctgttgaatgaatgcatgagggcctgctctgcctgagggctggggacagattgggtgttttctgtgtcccctccagagcatccggtgacccagttttaggtctcaaggtcactgccaagaaagagaagctgctaaagtgacacctctgtgcacccacatgacttaacacaaaagttaacaggagctcttcaaaaacaagcctctcgagtgtctgtctcctgttttccctgaggacagcatcagtggcatcagataggggttggggctgggtgacctgctggtcctcagccatcactgtggcccagaggtcatttaagcagctctctgcttagcagacaggcagagggaatagatggaaggtacaggtaaacactgcatgtggccaccgcgaggataccccggagcctgggaaacagacagggacgtcgtaaaaccaacacataatggaccagtgcagagacaggcaaaaccagtcagaagaaataggatggtgcctagcccagggacacctgacttaaggtatttttgtttgtttgttttgttttttgagacaggggtctctctctgtcacccaggctggagtgcagtggcatactcactgctcactgcagtctcaacctcccaggcttaagcgatcctcccacctcagcctccttagtagtagctgggactacaggtgtgcaccaacacatccagttcatttttgtatttttttgtagaggtggagtttcgccatgttgctcaggctggtctcgaactgggctcaagcgatctgcccgcctcggcctcccaaagtgtggggattacaggcgtgagccaccacacctcgttgacctaaggtattaactaaagaaagcaggtgattctcaggggggctatgaaagcagcatgcctaagggacaggaacgtaccatgaaggtgttgtcttttgaggctcagtccaggagaagcaggtcttttagacccaatgacaacgctccctagtgtgcaggtgcgtctctctgatgacaaaaggcagtgtgattgtgatattttatatatatatagtttttgttattgttgttttggggacaggtctcactctgtcacccagactggagtgcagtggtaagaatacggctcactgcagcctcaaaatcccagtttcaagcgatcctcccacctcagcttcctgagtagctgtaactacaggcatgcaccacctggctaatttttcaaatttttttatggagactgggtctcattatgttgcccaggctggtctcaaattcctgggtttaggcaatcctcctgcctcggcctccctcaatactgaggttacaggcgtgagccactgcaccaagcctatattttgttttttgttcacggttcctggcttataactcccatggcccttgttacagtaaacacgatctccctccctgacattcttctaccctcctttcacctgcccacagcaggactttaatctgattctgcgtgtaatctcattgcagagagggtcctgccggtattaccctggaggaaggaatgctgcacagaggccgagaggaatttgaacagactggccttgctgggtttttatctctttttgtccaatcccattttgacacagttgtccatgctccaatcatgcttatccaatgaagtttccataacaggcctgagaggacagggttcaggagcttccggacagctgagcaggtggaggttcctggagggtggtgtgccagggagggtgtggaagctctgccccttcccccataccttgtcctatgcattcctttatctgcatccttcattttattttatttttttttgagacggagtcttgctcttgtcgtccaggctggaatgcagtggtgcgcgatcttggcgcactgcaacctccgcctcccgagttcaagagattctcttgcctgagcctcccgagtagctgggattacaggcacccgccaccatccctggctaatttttgtatttttagtagagatggggtttcaccatgttggccaggttagtcttgaactcctgacctcaggtgatccacccacctcagcctcccaaagtgctgagattacaggcgtgagccacagtgcccggcctgtatcctttataatatcttttataaacaaccaatcagtaaatgtgttactctgacttctgtgagctgctctagcaaattaatcaaatccacagaagggtcatgggaaccccaacttgaagcctgtccgtcagaagttccagagtcctggacttgtgactggtgtctgaagtgggcaagtcttggggactgagcccctagcctgtgggatctgatgctatctccacatagatagcaatggaattgaattggcgggcacctggctggtgtctgctgcagagctcattgtttgcttagtggtggagagaagtctccctccacatgtggtcacagcatcttctgtctgtgttgattgcttttgatgttgatcgagagaacaggaaaaagcacattgaatgtctcaatgatgaagatgacaataatctggcttctaggttgttatgcggcaggcaacagctgtgcagatcctaataatctactctgggtgacagtttaacacaggggttggcaaatgtggcccacttcctatttttataaataaagttttattgaaacatg

SEQ ID NO: 783 - DNA, 4177 bp, Homo Sapiens
gcgaccgccccgccgggaggccctgcacgcacgcgccgccggccgggccagattagtgtcatctttgatcactctatctacatccaagttatcaatatcccttcaatggcacagcactcaggacagcactgccactaaagatgccaccatctggctatgctctaatcgggcatatgtgtcctcatcccatctgcagagggtctacaggggcttgcctcttgttgccagcactgcctggctctgcagcctactcaagaaaagaaaatgaaagcagcctgactccattcgtcatgattccttcttttccttttgaggctcacagacagaccgttggccagcctcgcccaggactgacgtcaagttcatcttttgcccttgtttgggctgggtcctctggcccagcgatggaacacttgtgtaccttcacctggtgccctgggctgctccagaccctggcctctggctgtgccaaagcaggaaggacagactcagggtgttgcctgtttgctctggtggggagaggctaagaatcgcagtgacgtagggagagaagaaagatggacccatgtggcaggagattgtgctcagggtagagtcagcaaaacactgacaagattccccaaaactctggccagaaagtgcctgagatctccgtttttagattctgttctttaaagatacttcatctgtatgtgtccttgagtagaaggcaagttctccttgaaggggacacgtttctctgctgtcatcttaggacaacttctttgagaaggagactctagttcctgcagccatttgagaagggggctggaggggctgagccaggaggttttgggggtgaggcccaggtagaactttgtggcagggagtgctggggtgtgcacccacatgggccaccccacaagttgatggggaaagggggcaagtagggagtacaaggatggaaggggttctcttctccccacccactttgcctggctgactcccatttgtccttcatatctcagtttcagcaccaattcctcagggaagccctgcaggcctcagaacaagtgagatccccctgtcattccctcccagagcccacactttttatccatagctcttaccacagttacagttaaggctgtcgcaaggtgtgcgggtatctcgcctccatccacgaactctctgtgatggcagtggccaagtctatctgttcaccactgagtccgagcacccagccctgggcctgcacacagtaggcactcagccatatggagtgttgtatgaatgaatacatgaatggaagaatggacaaatataactgggaggacacagtgcagaggcactgcagccccttctcatttttcgctggcctagttggacacagaggacttggatgaccagaggagggacgccacctggtggtaagagtgtggagtgagcattgagttcccttctcaaaatttgcctccagtaaacaaaataatcctgccttctagtcaaccctatcaaagagctgagcatcagggaaaaactccgatctccaggaacaaatgacaaaaaaaaaaaaaagtagaaggcactgtttccaaatggagcagaggaactgaaatccaagttagagacatgatctataaacacacaggaaagcaaccaaaagaaagcttggatttgctcatcatttcatctaaatgtagtgataataataatgactttccacttactgcgtaatactacgttccagatgcatgggtacactgtgctgtgtgctgaacatatttaatctcctttaattctcagcaacaaccttataagggagatattactatacccattttatggggaacaaatgtcagttcagaaagtttgagtaactcccaggatcacacagccaggacctgacaagctgggatttgacttcaggtctgtggactctgaaactcatgatattaaccattaggttagacacctgatagatatggccattcaacaggttgaaagtggatctcatcatctttgcttctcttcctcctccacttcacacctcagcgaacagcacaacctgtcctccccacacctatccagttgaccaagccagacatccaggcaggtttgtttttgtttttgtctttgtcttatgtttgagacagagtctcactctgtcatctaggctggagtgcagtggcaccatcttggctcactacaacctccacctccagggttcaagcaattctcctgcctcagcctcccaagtaggtggggttacaggcacccgccaccacacccggctaattttttatatttttagtagagagggtttcaccatgttggccaggctgctctcaaactcctgacctcaagtgatccgcccacctcagcctcccaaagtgctgggattacaggcatgagccactgtgcctgtctcacccaggagttttgataccacacctaatcactcaccaattttgttgattctctctcataaattcacatttttttcctatgctctctatcctcactgctgctgccttagttcaggccatgcccatctcttgcctgattagagggtctcccagcagtccctctgcttcccagcacatgtgtgattatttatttatttttatttatttatttattttttgagacgaagtctcactctgtcactcgggctggagtacagtggcacgatcttggctcaccgcaacctccgcctcccgggttcaagcaattttcctgcctcagcctcctgagtagctgggattacaggcacctgccactatgcccagctaattttttgtatttatggttccacaggctgtacaggaagcatgatgctggcatctccttggcttctggggaggcctcaggaaacttacaatcatggtggaaggcaaaggggaagtaggcacgtcttacatggctggagcaggcagaagagagggagcagggaggtactacacacttttaaacaaccagctctcatgatcactcatttactcactatcacgagaaacagcaccaagaggatgatgctaaacattcatgaaagaccatccccatgatccaatcacctcccactaggcctcacctccaacactggggattacaattgacatgatatttgggcagggacacagatccaaaccatgtcatccctttaaagaagtaattaaggctggatgtggtggcttatgcctctaatcccagcactttgggaggccaagggaggatggcttgcagctaggagttggagaccagcctgatcaacatagcaataccatctctaaaaaataaaaagtaactaagttaaagtacagtcatcagggtgggccctaatccaatgtgactactatccttataagaagaaattaggacacaggaaacagagggacaaatgtgaagacatagtgagaaggtggccatctgcaagccacggagagaggccccagaagaaaccaagctgctgacatcatcatcttggacttctcgcctccagaactgtgagaaaatacattttcgttgcttcagtcacctagtctggggcattttgttacagcagccctagcaaactaatacaatcaagaaaggaaatcagactcagcaaggctgagggacccacctagcgctgtctagctccttagtaatgcattcatcacattctgcctgtgaccactctcttatgttgattatcagataaaataatggatttaactcttattatttaacttcttgagtgtttgggtcttattgctccaactggcactcagggtaaggggccttgtcttccccttctcagtatttgcagatatcctagctgagcttggtgcatcttaacaataactttttgatgcatttcttgttgttgttgtgtggttgattgacacatttggatgggtaaaaaggagcctgatggctgggcatggtggttcattcctgttatcccagctgcttgggaggctaaggtgggaggattgcttgattccaggagtttgaggccagcctgggcaacatagcaagaactcatctcaaaataaaagtaaaaattaaatttaaaaggagcctgatggtaaattcctgatccccaagagacacatacaaaggtaaattcctgatccccaagagacacatattctgccagtgatcacacatattcccagaagtagaatatgactcatctctgaatgtctaaata

SEQ ID NO: 784 - DNA, 2672 bp, Homo Sapiens
agtcgggcccggagcccggaaggagtgccccgcggagagtcgagcttccttccccggggctgggggttccgcggagctcgctctgggctgtggcgttgctcgcccgcgagctcctggggagttcgggggagctgctgggctggtgcctggagcgggggccgcctccaagtattgtctttcgaattaagttactgtcgtctgtgttgtcaggcaacaactgaccttaaataaaaatgaaaaccagaagtaggctacacatgcaataggctacacatgcaataatggatacttaaggaatgggagtggctgctggtgactggagcagagagggtgtggtttccccatgtttcggggccggggggaaggagtaaagtctgtgttcagagcccagacgccatgtcggtcatcacatcaccgggagaactcgtggagcctgaggaaaggctacggggtgccagagtctgaaggggcggaagattgcattcctatcacgttcgccgtggcgcacaggggctccgctggggccgccgctcccgcaggagaagtgggcctgagacggtgcggcgtcgaccatagccggcccagcagaagccggggaaggccacaagtgtaactgggtccgagtactgtgaagaaggcgcctcccatggagaaagctaccgggtagtttaacaaggtggaaaagcgttggcctggggaggaggaaaggatgctcagaaagttgcctcaaaaggacgcagaagtggaggtgaatcttctgtttcagaggcatttttttgtgcctctgtgagaatgcattgcttcctggttgatccatcttcaggttttctctccgtcctagtccctgttctgccaccattctgtgtttgaatctggtacctaaagccgcagatacttggttcatagtagatgtccactctgcagtggctgaaaacacggaagaaaaaccatctttgcctgggaaggacattattgctagtgccattactgtcaacagttggaacaagataaacggcatgcccaatctagttgaggattttggacaccgggcctcccactgggactccgccgagaaaccaggtctgccattgccacctccgccgggccttgctgtcttagcacaacggagtctcgctgtcacccaggctggagtgccattggcgtgctctcggctcactgcaaacttcgcctcctgagttcaagagattctcctgcctcagcctcccaagtagctgggattacagcgcgctcaggaatatatgttgaaacacagagaaggaggagactgacttcgaggagatgcacaggaagatggccatgtggagacagaggcagacattggagtgatgctcagaagaaaaggcactctaggagcctgcagaagcctcagagagcaacaaagataaaaagaggcctgaaccagcagccttcattacaggcaagagtactgtgtccactgtggcctggacaactgtcttcttcatgctccaccattattgcacagaatcaccactgtcatagccagtcagtcacagggcatccagcagctgctgcaggttgagaagcaggccgttgagaaggtgtcagaggcctgcagccaaaagaaccagaggctgaagcaggccaaagtggcagttcaggctgaaattgaatagtgccacctgcagagggagaaagagttcaaggccaaggaagctgtggcactgggaccccaaggcagctgcagcacggaagtggaggagacccaggataaaatgaccatcctccagacctactttcagcggaacagggaagagggtgtggataacctcttggcctttgcggcatccagccagaaattcatgaaaactacggcataaatggataggaggagaagcgcctgttccatggactggcattttagctgccctcatgaaataagaaactttagcaagctctagttatattctaatgagaaggcatttaattatttctgtatgttgtatagttggtcccttcactttatggagagcagcaaatccagtttcttgtgcagacatagaactaaatgtgtcatccttttacttcatgtttcttaggaatttaatggttatgtgctgtctgttttcctatgccttttggctcaagtaacatatagcaatgttgactttttcttttttagatctagtaaaacaacaacaacaaaacaatctttgaagaaaggaagggattaagtatttttcctctaatactttcttgaaggtcaatgaaaaagtggtaaatagttatatgtaacctgtgtgaagcagcagccagccttaaaggagtccattccttccaaggcttagaacagtgactactgctgtaattgcttaggctgctgttagtttctcttaatcaaaattactatgtgatagaattcatgttattacttggtgtactgaaaataatttaaaagtaaagactctgtcgtgcaagaaaggaaaaaatgagaggcaaagaatgttaaaatagaaaaaatgtttttatgagagagttaaccttttaatggcaactatatgtgaataaaattaaaccatcacttaaaatattcattagaatgaataatagaataaccaagttcataattagtaagataaaatatattgttgttttttcgttattttttaattcatattagaatttctgtcagt

SEQ ID NO: 785 - DNA, 3569 bp, Homo Sapiens
aaaattttgttcaaaactatttttcgatgtcccatgccatatcagaaaaatagtgcatgttttcttgcctgaaatggagaaaactctccaaattgcttttaaataatgtccaatctcaggccaataagcactgtattaagtagtaacagactgtgaggagacagagagagacagagactcagagacagagacagagattctagaatatgcaaagacaacaaattccagaaggctattacaaaatggaagcaagaactaacgtctgccaaggtagatcatctgaatacctggactctctaaggaatgctcattgtgttaggtctctttttaggaaactctgtggtgttgagataggccactgggagttctacttgcatgattttactctgacatggtgggccgctattcaggcagtgtcaacatacttgcagtgatggaagatgtttgggtttattctgagtggaaaatgatgtatttttgtttgtttgtttgtttatctgtactttggaagtcctgattgaggagcctgaagatatccacactgagcattgatctgtgcatcagtaagtctggatctaaagaggaagatccacactggagcacaggtcttctacaatgtagtcatcgtgccctgtgtgggggccaccatgggatgggccccaagaacatggtgtgaacaacaacagcaaaaatggtcttgacctcagagagttcaggtctactctgatgggaaagaaaatattacacagtgcccacctttccgatggagctgaaggagacggagtcagagggacttaaaacagtaacaacaacaacaaagtgacatggaatccatgaaagggagtgtgacagataagcaacttttcaactgtattcgcatttatagagtgttttaggaaggtaaatattgaaaggaacacaacgaagtaaatgaaattagaaatgcacattttattttgtgaaaatacaattttttgtctgtactaggactatatcaaccagaaagatagctctccatgagacatcatgactctctaaaagatgcttattgtacagatgatgtttttctaaatttacagatctttttcacctttagtgtttatgcctggtatacattttatcctatattatcttgcacttttatcattcatgaaacattcagcaagtctttactagctcgttggtgaaagcaaaatgaatacacatttctccccatttggcagacattttctgagggtgtaaatttaataaagttatactgagaacttcttaactacctcctatacacaagatatgcacacactgagagaatggtgcagatgtgttaattagtatacatagaaaagtaaataacaattcatggcaatcattgtatgtaggcaatcagtagggtttctattagattcattagttctttcattcactcttccaattattcatttgaaatatatcttcacatttcattcaaaacctaagattctctgattgtatgatatgatggcttcaaatccactcacttgtctaggtttaccttgaactcttctttatgatgtgtgtgctctctttccaaacagccctaagaaaagaggtcagaggacataatttctctttcttcagaggcgtattctctgaaactcctggaagcatgctatgaaagcaagtaatattctctccatatctacttgctaaaagaattagtgtatatatgcacataaacatacaaacagagatacataaatacatgtattttctaaatgtggtgtcaatatctcatcaatattctgtatctcatcctggattgagttacttatcccaaggagtctcttgctaaactgtagaataaagtatcactcagggcattttgatatatccaaattaatgcagctattttaatgccaccatttttatccaggaggttgtttgtagaattttttttatttggtcccattaaaatatgaactcactgcatttctttgttcttatttatcagggaggccacttaagagaagtcataattatcagcccattcttgatcctatctccaacacaattcccatccctcgagtgaggtaggcaaataaattttcccattgtgccttcatttgtatttatgcttatttcctgtctattcaaaattctccatattttcagtccaaattgcagaagaagctagtttggttggcttatttaattactattaactttactgagtagagtcatttatggctgaacatgttattgttcatcatggaaagtatggcttggttacctttcaataacaaaagcatctgatcctgatctaatcagtggccaactctgcctataggatacttcactacttatttcataagcattggtttgtggataatgcaggttcacaaagaaacagatattgggtatagcttggctgaccaaaggtgctaatttgcctacaacaaccccagtttgcatccgctgtttagctctcccagctgtctaactcacctatccttcctcaagtattaatgtagatacagtgccctttgtgtcattggttgctatctttctatatgcatagtttcaaggatgtgcctatctaaaatgatcaaacctacacacaattattgccttccaataaggatggaattcaaaggcatctctggttactatatccacagagaatatcacaggctcctttaaatgctgtttgtcttggaatccacagtctccatatgttgtatatttttcctctaattccatcataattccacccagatgttaccagatcatctataagctatggactacatagtaaattgagttaccaatacagttagtgaagagaggataattagaacacatgcaaacacttatgaacaatggcagtaataaccaggcacagatgaaatctgaagtcctttttctacttcacaacagtttagcagtttttttgttgttgttgttgttgtttgtctcttattttctctgtggcatattcttatagtctttggctttcacccagaaccccagttggctataactcttagtataatggtgtgagacaaacccctggttgttcagaatccaaggcctttgtggtcttgcctgtgcaatgcagtggtagactgttgttaacttttaccactgaccatggtcatacaagaaccatagcagagattccccaagtcccaaattcacctgctatgaaaattcacacctaagatgtctgcatagcatgatagcacctatgatcacttgtttctctaaaattacggagttttgagattgttaatgtgcagttttagtttccaacttaatgaaatgtaggtcttttctctaggttgaatgatacttcttttgccttttataattgtagaggagaaaaagtaaagattttgaaatttatccattaagaataatcatgagagattaaatccaacacctccaaagcacggtgtcaagattcaagtgttattgcagggaaaaaaagagataatgtttcagattgcagaccacatcttagaagcaagttcatcaggaaaacctcaaaaatcccattttaataaagacatttcacttctagagcagtc

SEQ ID NO: 786 - DNA, 20589 bp, Homo Sapiens
acactctcccctcttcaaaagaggagggactggaaaggaaggagtccaatccttaagagagatgggagaaggacagagagtctcggtctccgaggataagtccagtcaaaagctcgcacgggctgtcctagcaggggctacggcggccgacaagtcccatgagcagcacctccgcttctgcacgcgcttcccaggccggaatgctcggcgctctcgcgaggaggggtaccgactggggcgggagtacttcggcgagacttcctcctctttcggcccgacttcctcctctttcggccccgcctcttggcgcggggtcgcaattgggcgggaggttctcgcgatctccccgtccacgcctgcgccgcgagaggccgctaggtggaaggggacttcggttccgcacgtcgtcatgttgttggatggcaccagtatgtgacgttcctaggaacttagctctgaggaaaaaacaaagcaaaccggggaagtacgtagccttgaaccggagtaaccagggacagaaaggaaggaaaagggtttcataccttcacggaacgacgctcacttcgtccgcctgaggaggaaaaataagtttaaacctttctgtgaaaaagaacgtggagccctttctgccgaatggaaacccgctaaaccccgttatggagtctgctacaattaagcatctaaccaggaattgtctatggacacaactctccaggcaattcatgcagaaagtgtgttgacgatttcctgtttcttgcagagcgcttcaccgttaaggctcttagtagctggcgattgtaaagcacattttccgcttcatgaaaatacagtgctcttcttgtgtttgtaaccttggaaagtaagtctgctatgataagtttagggaagtggcggggagctactttcctaacatatctgtgattgttttgatacttctcagtttctcgcgggcatttcctgcgttctctatagggctctcttgcactgaataaggaaaggaggaattctctctgcattgaggctattatcgcacattgtgcggtggatatagtcacgcgctgggtcgtagtagcgtgtcgtttatttcagtccagctcactcttggtagaatccctttattcgttttgttgtttttgatagtctctctctgcttcccaggctagagtgcaatggcgctatctcgactcactgtagcctccgccttgagggctcaagcgatcctctcacctcagcctcccgagtagctgggaccgtagacgcctgctccccatccccgctatattcgttctttaatacagtctctcagcttgttcagctgccacttctgtgcagctcattagcctgatcggtgaaaactaggcgagacgcgcacactgaccctgcagtgcatcttgggagttgtagtcataactaatcaatggtcttgttaaaacgtgcttatgttttgaccagatcgcttaagtgtggacacccttcagcagtacactacaacgtgggtcagtgtacagaacacatgctgatagaaataatttcaaaatctggattcatagtttttttttttaatctagagacctcagaaaatgtacttgaagaaaatcatcataatataatacataacaatagagccaattaattgatgtgatgaaagtggacaaaatgtattttgacctcagagaaaataacatttctgtcttggaagagtcagagaatgcttcacacaatttttgagcctgatgttagactctccagccttctgtccaagcctcaccctttggttactccccaggaagactgaacttgggaagaggattgtgcagaccctggagtcaggcttggcgtttgggatagggaatactagagtgcccacagcatggtctggaaaagggaaagtgggctgcaggtggctacagtcccatgattccatggatttcagacccctccaaagcacagggctcagtgcttatccaagtctgagggccccccataaccacatcttccccagcagatgttctttgcttcaggcagtcatcaaagttccacttcaaagagttgctaaccaaataagcccacaatcttccttttttgttgttttgaataagtaatgcctttacacatatgaaattaaaaagagaggccgggcatggtggctcacgcctgtaatcccagcactttgggagggcgaggtgggcagattgcccgaggtcaggagatccagaccagccaggccaacgtggtgaaaccctgtctctgctaaaaatacaaaaatcagctgggcgtggtggtgggggcctgtaatcccagctacttgggaggccgaggtaggagaatcgcttcaacctgggaggcagaggttgcagtgagccaagattgcaccactgcactccagcctgggggacagtgtgacagactgtctcaaaaaaaaaaaaaaaaaaaaaggcaaagatatatagtgaaaactaagtcttcttttagtctttgtctcctgccactcatagaattttcctcttggaatcacctctattccattttcctgtgtatgttgccagagcagggctggcttcatggtggtgacctgtacagataggcacttggtttaatgttttgctgtcactaacttgaaattcaggaaagtttctggacaagggccctgcggttttattttgcactgggcccacaaagtatgtatctagtcctattccagagatattctatgcatatacaggtaattatatgtagatatgtatgtagtggtccagtagtggtccagggcctgttaggaactgggcggcacagcagaaggtgagtggcaggggagccagcatttcggcctgagctctgccccctgtcagatgagcaggggcattacattctggtaggagtgagaaccctattgtaaactgcacatgcaagggatctaacctgtgcactccttatgagaatccaactccccctttccatggaaaaattgtcttccacaaaaccagtccctggtgtcaaaaaggttggggacctctgtagtaggctaccatctaggtttgtttaggtacactctatgatgttcacacaacaaaaaatcacctgatgatgcatttttcagaaagcatccccattgttaagggacacatgactgtaatggaatactattcttttccttcctttttattttttgtggagacagggtctctacatgttggtgcccaggctggtctcacactcctgagcttaagggatctgcctgctttgacctcccaaagtgctgggattacaagtgtgagccaccatatctgaacccctgtcccccactttttttttctttctttttttccatacacagtccaggctggagtgcagaggtgtcatctcggctcactgcaacctccgtctcccggattctaacgattctcctgcctcatcctcctgagtagctgggattataggtgtccgccaccacgcccagctaatttttgtatttttagtagagatggggtttcaccatgttggtgaggctggtctcaaactcttgacctcatgtgatccacctgcctcagcctcccaaaatactgggattacaggggtgagccaccgtgcccaggacagccttttttgggtcagtgtgtatatagagctaactcattctacttaatggctacatagtatcccactgtgatagccgcaaaaggcagacaaatcctaggcagacaggggcaggtccctggtgaaacccttcaagctgaggacagtttaaaggctagccacaagaccaggataaatccacagaccagattgagaacctctcttcccatttggcgtgctttcttctgattgatccccacccttcacctattttacacatatcctttcctaattgtttttttacactgttgtacctacctttgagtggtgctgttgttttagccttttttgcatactcacaaaccaatcagcatgcacgccttcattctgagcccataaaagctgtggactcagccgcactgagagagagaccacctgactttgagtgagggaccacccttgcatcctctctctcctgagagctgtttcatagttcaaataaaactcttctccaccctcctcaccctttgattgtcagcgtaacctcattcttggacgctgaagaaaaattcgggacccaccaaacgcagatacaaagaaggctgtacacactgtggccctttgccctctgctggtggagggcaaccgtcccacacaacgcgatgggaagcagcagtggggcagagccagtcctgaagccacgggcctgagtggggcaatgggactgatagagctgttaacatgccactgtccgttggcctgcagacggcagaactaaaagagtgcttagcatactgtaacacctctggggcttcagggtcatgagcacccctgtttgggtgccaccacatttccctcaatgtgacacacctggtccagccacaagccccgcacagagcccactcctgccctgtactcgttcactcacacaccccctcctgccaggggctgaggccatggtggctgcaggattcgtgcctgagcacaagccagacacatcctggtgggccgagtagttggggtgttgctggccggaggtctccagctgtcaaagtggccaagaaaaatcctgcatcaactgtacaaatgtaccctaatttatttaactcatttattgtatatttgtgtcatttccaatggttcgtaatttcaaacatatgattgtgcaaaagttgttttatgtgtgccaatatctttgtaggttaatttcctagagcaaagtttttcaacctaagcaccactgacatctggggctggataatttgttgtgaggggctgtcatgtgcgttatacgatgtatcctatccacccctatatgttatgaaaaatatttcagtggccagaatcctttcaatgacttaaaaagcccttttcatcctgcttctgcctacctctccagctgcatcttagtacccgcacactcttttttcatactcatgcccctgcttgctgtctttgcacaggtattctctttgtctggagctttcttcctcaccaatcatctcctaataactcccattttatcttttaaatgttgccactattatcacttccttggaggagccttcttggactgcctatttcaaatcccctgggttttttttttttctttgacaaaagccacattcgaacaaatcccccttggaatgttacaattaccaaaaaatccaatttaaactagtttaaatgataagagaatttattggctcacataaatgagaagtctgaagataaggtgaacctcaggttgatttgagtgacttaacagtatcagcaggaacttgatttccttctacctctcaattttctttctgatgtcagattcatcctaaggcttactccttttgtatcataaaatggtggccaggatctcccaaggttatgtagttctttgtccatatcaaaagagagtttctttcacatatttcacagtttcaatgtgattaaattaatttaggtcacatgtccgcccctaaacctagagttttgtggtctagagaatgtcaagcactgattggccagggcaaatcaaggcctatccttggaactggaagttacgttaatcccacctaaatcccatgaatgttactctatgaggtatcggtaaaatcgatgctaggaatacaatcagaatccattatatcctattacacgcttatagcaccatgcacccctccattgtagcacctgtcatacttgtagctttatatttatttgtatgatttctgattaataactgtcttctcatccagatgaaaaacctctattagtccagggaactgcattttttctcaccattgtatctctagtctagcacagggtgtcaaacatagcaggttctcaataactattgaaagaatgaaacttcccttagaagtttactactcaatttgacattccctttagcaggcaatttaatagctaccatatcagacttatattacatatttgaaagtcccagactgagatctctaatttctatctccaggcagtcagttcttgacacaccactgagtaagattcatggaataaatctgaccatattatattcccttgacatctttcaagttcctgatttcttttaggataaagttctttatgatgccattcaaagctcttcatggtttggcccctatctggctttctattctcaagagcaaaactatagacttctggccttcttcagggtgatctttctctttcaatcatagtccctccccaaccactcaccaaatatcagtttttagaagtcttgtctcttgcagggagtagagagggggcagtaatagtttattcagggattcccccatatctttcctgggtaaaggtattctagaaggaggcagaggaaggaggctagaggtcccactgtttggcattcaggctttcacttaatgctcactttagccctgcttcacagtcccctactacctactgtgactaatattctcaagtcaagagtctctcccattctagaaaataaatcaggctcctgggatgtggtgatggtgttataggggcatgtgtgggtatgagtgtgtgtgtatgtgtgtatgtgtgtggggtggcagtcctttggttatatgggattggggaatagacccaggaatgtaggtgttctttatataggctttcacccttccctaaaattttctgccctgatcctttctaatttttttgtggaaagaattagctcttttaatttatttattttattttattttatttcattttattttatttttttgagatggaatcttgctctgttgcccaggctggagtgcagtggtgtgatcttggctcactgtaacctctgcctcccaggttcaagcgattctcctgtctcagcctactgactagctgggactacaggcatgtaccaccatgccaggttaattttttgtatttttagtagagacgggctttcaccatgttagccaggatggtctccatctcctgacctcgtgatctgcctgcctcagcctcccaaagtgctgggattacagacgtgagcgactgcgcccggcatctttttatatttttaaaaggtcacatgtatgtcctttcctgtgaactgtttatattctttgccaaagtgctgggattacagacatgagccactgcacctggccttacctcttctttttttctttaatcacctgtggaggcttttagattgtgccttttgctgtcaagtctactactactcttccatcggcttgtcatacaaccatttgttgaaatttcttttgtattttgtttgccttttgggctctacactttttaaaaatttatttagctgtcaaagagatgacatactgtgtatggttaattttccatgtattctggagttctaatatattttcatggtttttaaatgtttagttctttaatcaagttggaatttttaaaatatatatgaagtaggatgctaatttaaaacttttcctccaaatggatatccatccagttgtctcaacatcatgtatagaaaaaacaaattgaaaatgctatcttatcatattatttactaaatttacatgcatatacatatacatacataacatatatctgagtttgagtctgaattcactactgtttcaattgctgtagttggtcaattctagtatgacagagttttaattgctacagttttggaatgattatggggttacttttgagacagggtctggctatcttgcccagactggtctcaaacttaccggctcaagcaatcctcccatctcagcctcttaaagtgttgggattataggtatgaaccactgcacctggccctggattgcattttgactgtggccatagaagtttccactcagatcttcaagagaacctactctggggactacaagtgactgacagccagctgccacccctttggaactaccatgcattcatgtcaatgccacatatctctggagtcgcccccagctagtggctgagcacagcaggagtactaaacttgttctttcttgcccagtgcagaactcctctaacgggcaactttggcttggggaacttctcatcagcctggatgagactatcttagaactacagtgtagtcgaggctctttctacccaatatttccttctcttctttttacagaagtcagacctgcaccacagtctgaagtctctctgccaattcctgagccttcccactttatccttcacaaacatttcccccaataaatatcttgcatgtctaatcccttcttggcatctgcttctctgaggaccagaacagacaggtggtttaccaagtggtgcaagaaaacagatagtaagatgggttttgggcaatggcttacttggtccctggcacaaagcagccatctgagtcctgatttagccagcagtgacctaggaaaacatcccagagaagggaaatcctcttgctcgtgcaatttaggcatttaaaagatatggggaatacgatgcctacaaagaaagcagagctggccaactgttactaagacaagtaatgccttgcagatggataatgagaaaccgagagcacttaaacagttaaaggctaagtgtgggagccgggggcttctctggagcttaacaaacttttatttcctgcagtggaagagcagaaatgggattggatggtcacagagctctaaagatatttgaatgctcagcctagggagatccagtatgtagtcagggcgctggttggggaaaccagcctgaagctttgaaacatggaatgggtgcccctgaggattttggctctgtagatacctctggacactcaagagcttacagaactggctcatacttcctagtaagagcaagcacttccctcattacagaaagacctcttccataattgttctcagtttttctcctggctgccaagccatggtaactggagttaacatctcagcataatctgcctaggaactgctggccctgataagaaaggaaagattacacaccgaaggaattgaaataagttaccatgactatcaggagccagagaagtatacttaggattggattttaagggtgttcaattaagggggctggaatttaagacaacataagcaagacttcatggacttggggtacttttttgggacagatttaacctcagcaagtagtcccgaggttagcttttcaaagcctggaaaaggtgatggctttgaaaaagtggaaatgaattcacaccatggcagcttttaacttgaggagaagatagctatttattttggcatatttatgtggttactgctcacttactagtcccaattgttttgtaaccactttttatttattttttgagatagtctcattctgttttctagactggagtacagtggtgcaatcttggctcattgcaacctctacctcttgggcttaagccatcctcccacctcagcctcctaatttttgcattttttgcagagatggggtttccccatgtcacccaggctggtcttgaactcctggactcaagtcatctgcccattttggcctcccaaagtgctgggattacaggcgtgagccaccacatcgggactgttttttttgttttttgagatggagtcttgctcttgttgccaaggctggagtacaatagcaccatctcagcttactccaacctccacctcccgggaggatcccttgagcctaggagttcaaggttgcagtaagctatgattatgtcactgcactccagcctgagtgacagtaagaccctgtctaaaaaataaatagtggtttttagatgatcatctgcaaatatttttgttctttccctgtatccctttttaatctcatcacattgattaggacatccagaacactggtgattcttgttttgttcctgactttaatggccatgtttccagtgttgtatacatgttcctaatttttgatacataccacttgtgacgttaaggacatttcctgatattctaaactctctaggaaatggatattgaattattaaaaaaaaaagtctctttttagcctgggcaacatagtgagacccagtctctaaaagaacaacaacagcaaaaaatttgctggcatgctggtgcatgctggcagtcccagcacctcagcaggctgaggcaggaggatcacttcagcccaggagtttgaggctacagtgaactatgatcctgccactgcactccagcctgggcaacagagcaagaccctgtctccaaaaaaaaaaaaaaaaaaaaaagaaaaacaggaccattttttgcatctggtgaccatatggttttctcttaatattatgacaatttataactgttctcataaatgataatgatctataaatttttatgtttgcttttttttaatcatctcttctaggttatgagtcctaggcaattgcattaaattttataaccatagtattaaaaaaactatttatagtcaacaactcaagtttggttttcatgaaacactgggtatttttcaatgcttcccatcccatgcaggataaagtcagagtactaaatctcatattctaaactcccacacaatctgacgtctatttactggcttcttcatccattaataaaactgttccttctccacaaagtgcctttccctttataatcgtcctttaaagcccagctcaaatactaactctctatattgaaatccagttcaaattccacttcttagaaaccttcatttttccttctagtttacctcttctctttttatagcatgactttttaaaaactttcattatagtgctcaccaacctgcctttcattaattagtaactctgtattagactatatttaagtccctgaaggaaacaaactattccatagcagagtactgtgctcctaataggtagttttaaagtttttattacattaaaattaattttgtaaatttctgttatattgaagcctcttgcaatgatctgagatatgctttagatggcaaaactgaggttgctttaaatattacctttacaaaagtcacttattaccaaattgccttttagaccattttacctgtctgttggttgatgacttcatactcatatttaatgagtcagacatctctctcttttttgagacacagtctggctctgttgcccaggctggagtacagtgggacaatcatagctcactgcagccttgaattaccgggcccaagtgatcctcctacctgagccctcagcctcccaagtagctgagattacaggtgcgcaccaccatgccaggctaatttttttattttctgtagaacaaggtgtgaccatttggcccaagctggtactgaactcctgggctcatgtgatccacccactttggaggctgaggcgggcagatcacaaggtcaacagattgagaccatcctggccaacatggtgaaaccccgtctctactaaaaatacaaaaattagctgggaatggtggcgtgcagctgtaatcccagctactcgggaggctgaggcaggagaatcgcttgaacctgggaggcggaggttgcagtgagccgagatcacaccactgcactccagcctggcaacagagcgagactccatctcaaaaacaaaaacaaccctattttgtcccttttagtttctatttatgtaacagatcctattgtcctcacaatcctcagcctgaaatccttagtcataactgccgctctcttccctccacttgccactcactccccattttatctgggttaagtccatccattatcccttatatttgctctgcaacatcttggtatgtgcccagcccactttttctgaatacactctcttctcagaagtgagctcttggtaattttctgaccagttgcttataccaggtttagggttaccagatttagcaaataaaaatatagacaattgtctgaccagttgcttatatctggcttatgggtaccagacttagcaaataaaaatataggacattcagttaaattatttgaacttcagataaacaaggaataatcttttagtgttacatgggacctacactgaacatctgtttatctgtaattccaatttaatttggcatcattattttatctggcaatctcagtcaggtttaacacctttcccaagctgagcttgtcatttcctccaaaagaacacaaacctataaaggacaggtaacgtcctgtgggacagccatcctttgccctatgctgagaaaacaggtttgcagagaataaaaacgaacaaataaataaacatttaaaaaagcagttgtgtggaaagaagcacaaaagagaggccatgagactccataattaagcagagatgaactgccctagttcttaatggcttgttagtcctcattccagtcttccacagggtgtgacttggcttccataaaataaactcacggtcccatgatcattttccctctttgctttagcaagaatctttaactaaaacaactctcttttcatttccactgtctaccactctagtctcaactctcatgagtctggaattttgcaaaagcctgataaacttgtcacatgattccagtgtctacccattccttgtaagtaaccaagatattcttgcctgattaaatgctttgaaaatatcatcttaggccaggcgcagtggctcacacctgtaagcccaacactttgggaggctgaggtgggcggatcacttgatgtcatgagttcgagaccagcctggccaatatggtgtaaccccgtctctactaaaaatacaaaacttagctgggtgtagtggcgggcgcctgtagtcccagctactcgggaggctgaggcaggagaatagcttggacccgggaggtggaggttgcagggaggtggaggttgcagtgagctgagatcacgccactgtgctacagcctgggcgacacagtgagactccgtctcaaaaaaagaaaaaaaaaaaaatatcatattgtattggccatcccttgtttcatattcgttaataaactttgctactttgctttctaatttcggtgaagaacaagcacaagattaaggagtaagactatgtgaaactgggttataaattgaaaggctgttggctgttgtatcttgtaaacaattcaacgcaatgccaagtgaaaatgaagttgttagtccctctatctagaattctttcccaaatagctgcatatctttttcctctgcttcatttaagtctgtgctgaaatgttatctactcagagaagacattctggatcatttcatattaaatagtaacttttatcactctatctctttatctagttgtttttctttaaggtacctaccactacctgacatgttgtacagttaagttcttacttaatgtcttcgataggttcttgcaaactgtaactctaagataaactacataaaatgaaaccaaatttaccacaggctaattgatataaacaagagttaagatcctatggcacatttctggtaaaaaaaaaaaattaccaaacttgcaaataaagaccaaaacatttctgatgttaaacactgaagtaaatgtgagctagacaacattcaagaaagatgaataaaacaagatgatttatcaaattacaacagttcagggttttgggtggttggagcccatcctggcagttcagggtgccaggtgggaagtgatactagacaggacagccatcacattgcagggtgcactcacacacacatccacactcactcagactgggcaacaagagcaaaactctgcctcaaaacaaacaacaaacaaaataaaataaattatccagactcaggtatttcttctttcttttttgagatggagtctccctgtgtcacccaggctggagtgcagtggcatgatctcggctcactgcaacctctgcctcccaggttcaagcgattctcctgcctcagcctcctgagtagctgggattacaggcgtgcaccactatggccggctaacgtttgtatttttttttcagtagagacggggtttcaccatgttggccaggctggtctcgaactcctgacctcaggtgatccacctgcctcagcctcccaaagtgttgggattacaagcatgagccaccgcatccaacctcaggtatttctttatagcaatgcaagaatggactaatatactcctgcagacgtgggaaaaagtgcagactccacacagacggtaagcctggccaggaatcaatgttttgtttccttctcaacaacattttaatgcaaatgatgttgaaaaaaaagttattcaaggacctgctgtatcgtaatttgctatcaatttccaaactctagaatatgagcattggaactttagctgttttgtctgtttttgttattttgagatggagtcttgctctgttgcccaggctggagtacagtggcacgatctcggctcactgtaacctctgcctcccgggttcaagtgattctcctgcctcagcctcccgagtagctagaactacaggcatgtgccaccacgcttggctaatttttgtatttctagtagagacggggtttctccatgttggccaggctgttctcaaactcctggcctcaggtgatccacccgcctcagcctccctaagtgctgggattacaagtgtgagccaccgtgcccggcctaacttaggtcttttatttactgacacatcccctgcataccttataatgcctggcacatgttaaatgatgaataaaagaatgctatgcttggctgaactgaactaagaaagatattcatgttttcattttagatccaagaatgtaagatattctgtaatagaagaaaaaatgattatataaaaactgtactgtgatagaacagtaacttatggagtatgtgtgttcctgtatcaaaacaaaagtcatgggaaaaaaagtcttacttttaagtacttgtattgagctaaccaccaaagatggcattcagtttgatctgagtcactataaattagtgtttccagcatataatatagccgtcatagaaaaacttcattggggccaggcgcagcggctcatgcttgtaatcccagcactttgggaggccgaggtgggcagatcacaaggtcaggagatgagaccatcctggctaacatggtgaatccccgtctctactaaaaaatacaaaaaaaaaattagccgggcatattggcaggtgcctgtagtcccagctactggggaggctgagtcaggagaatggtgtgaacccgggaggcggagcttgcagtgagctgagaatgcaccactgcaccccagcctgggcgacagagcaagatgccatctcaaaaaaataagaaaaaataaaataaaaatacaaaaattagccgggtgtagggcacctgtaatcccagctactagggaggctgaggaaggagagttgcttgaacctgggaagtggaggttgcagtgagccaacattgcgccgccgcactccagcctggcaacagagtgagattctgtctcaaaaaaaaaaaaaaaaaaaagaaaagaaagaaagaaagaaagaaaaagaaaaacttcattggaaagtagggaaaactaccaacatttaaatgaagacaaaaataagaaaagttcagacataaagtgtaggctcttggtttaagcagaaatggtgttcttttggtggtttgcagttagtaagctgtatttgtactttgtgtcagttcaggtttctggagtttgtttaagaactggcttcattttccatattattaggagttgggagttcctttgaaaaagaaaacagaaaatttaagaaaaacacaaattgcaattttgaaattctaccattaaggatgatatcttaaaataagaattatgtcttagaaagcagaagtgagaataaaaacttttgttactgttattaaataatagtcgatatcaagtgtagaaagcaaataaatttaatctttcattttcaattaatctttaatatttcagaagtatatcaacattgcctaacatgctattttacacacaatagatatataatcaatgtttattgacttaaaaatctttggtttagccagataaatttgtaatattttatgaactagttaaccctgagtcatgaatttaccttttttttttttttttctggagacggagtcttgctctgtcgcccaggctggagtgcaatggcgcaatctcggctcactgcaacctccatttcccaggctcaagtgattctcctgcctcagcctcccgagtagctaggattacaggtgcctgccaccatgcccagctaatttttgtatttttagtagagatggggttttaccgtgttggccaggctggtcttgaattcctgacctcatgtaatccacccgcctcggcctcccaaagtgctggaattacaggcatgagcttctgtgcccaccatttttttttttgagatggagttttactctttttgcccaggctggagtgcagtggtgcgatctcagctcactgccacctctgcctcccaggttcaagagattctcctgcctcagcctcctgagtagctgggattacaggcgcccgccaccacacccagctaatttttgtatttttagtagagatggggtttcaccatgttggccaggctggtctcgaactcctgacctcaggtgatctacccgccttgacctcccaaagtgttgggattacaggtgtgagccaccatgcctggccagatatacctacatttttataagatttaaaattttttttagagataagagtcctgctatgttgcccaggctggagtacagtagctattcacaggtatgattgttgcacactacagtgtcgaacttctgggctctagtgaccttcccacttcagccttccaagtagctgggactacaggcacgtaccactgagtccagtgtatttttataagattttaaaaaagattacacattctaaattatgacgtccacataccatttacttttctgtggaattataaggtgatattttaaatgatgggaatgaacaacttgacatgtgtatcagtaacctctaaacatctatttcaaacatctattaaccgaaagtcatgatccttcagctcttatactaagaacttccatacattagagcaatacacatattcaaattgacctagttcaatttgataagtaaacaattttttttttttttttgagacggagttttgctcttgttgcctgagctggagtgcaatggcgcaatctcggctcactacaacctccacctcctgggttgaagtgattcttctgcctcagcctcctgagtagctaggattacaggcatgcgccaccacgcccggctaatttttgcacttttagtagagacggggtttcaccgtgttagccaggatggtctcgatctcctgatctcatgatccgcctgccttagccaataatctttctgtttaggtaaatttgaaaaatatacatcattactaccacattcatcctagttagaatctcatttatatttattccactctgtttatgatttggtaactaatttgaaaggcattatattatcaaaagtgtatcagattagctccctcaactcactatatctgttaacagttctgaagaaataggcactggctttgaatatggcctgttccagtttgtgaaccgttgtaggcaagtaaagttgttgggcacagaggtgacctgtaggatgactgaaggtaaactgtcactactgtatacaaagaagaaaaataagatgtaggaagagatctgttataataacatatgacatattctatctaagtttttcatatatttcagaattgtaaaaacaaaactatgtaattttttctaagatgtataaatgacttacttttaataataaatatttcttgatttataatgtaaatacaattaaacaaatatgggttactcgaattaaaaaaatggcacatgtaaatgagcattttagtacaaataattaaaatgtatttatattatatagaaatctacacaatggaagatactactaaaatgttgctctacagcacatcaccctagacaaaatagaattctagaattctctttaaaaaaaaaaatcactgagaattagatgatgactgtgaaataggttctcccattacaatactacttctgtcattcaaagttctgaccacggttgtagctggcgactgaagcacttttcgagaaagcctcattcttccatcggctgggtcacgtccaaagtatttcacctgtgttaaagaaacagatcttcctttaaagttacagcacattgagtgacatctaaactaatagacatttaaatttacatggtccaaataaggcaatgattgtttttacttgttcactgaaagcattgttcagtgctaagtggacgtatacacttaacacatataagtagtcattataaaagagaaaagagacggggcagttagttgttcaactataatctgccgctgaactcatctgtgcctttttattctcaccaggccaagtccttatactgggggaacagtcacaggcatagtgaatgatcctagacaagggctttgagagcctaattgtgttatatactatagaggattatgcttaggtcacttggattttcactactgctcaaaggaccaacacattagtgtttatttggcttcaccttggaaaatgaaagtcaggggcaaatgcaaaggtttaaagttccttctgatgtgaaaacaacaacaacaacaacaacaacaaataaaccaaaaaatcaaccttatacagagatactatatcttagcactcatcttcccctggaggctacttggacaataagactacacattgggaataaaccagaagccttagttactcaggtcatgcgtattagcgtaagtgaaagacaatgtggtggagcccgaaaaaacagactggcaatgacttctttcatccactcataaaggactacaaagaaagggccaattttgttatatgaattctaggcctgaataacatggctcttaccaagctcaaaaactttaagtagtggagaaacaaagtctcacctcctcaaagatgacattcaaagactttaacaagttaccttatcacagttcttacgtcagtgcccaaatcatggagtctgcatagctaacactaacatgctcatgtattttttaaacgaactaagggtgactaccattttggccaagctgcaagctccttgagggaaagaattgtgtcttaaatccttaatgagtctgttcaagcaattctaagattaaaaatgaagtactgcatacaaataaaaaacttcatagatggtgactcttctttcaactttttgaaaaaaacaatggaagcttcaagaacaatttacaacttcaaggctaaaaggtggaatacaaatacctgaatttcttggccaacttctaatcctagggcagtaggatgtttaatctggaaaaaaaaatgttaatctattagttgttgtgcataattatgtagtgtccatggaagtacacattttttcctcaagctttattagtttttctgattaaaaaaatcagttagcggctgggcgcagtggctcaagcctgtaattccagcactttgggaggcagaagcgggcagatcaagaggtcaggagattgagaccatctctggaggtcaggagagtgaaaccccatctctgctaaaaatgcaaaaaattagccgggcatggtggcgggcgcctgtagtcccagctactcaggaggctgaggcaggagaatggcgtgaacccaggaggtggagcttgcagtgagccgagaccacgccattgcactccagcctgggtgacagagagagaatccgtctcaaaaaaaaaaaaaaaaaatcagctgggcatggtggctcacggctgtaatcccagaactttgggaggctggggcaggcagatcacttgagctccggagttcgaaaccagtctgaccaacatggtgaaaccctatctctactaaaaatacaaaaactagctgggtgtcgtggcacacgcctgtagtcccagctacttgggaggctgaggcaggagaattgcctgaatctgggaggcagaggttgcagtaagctgagattatgccactgcattccagcctgggcgacagagtcagactctgtctcagaaaaaaaaaaaaaaatcagttaattataaagatttaaaatacagatgtattaagaacataaaaattatccaaaacaggctgggtacagtggctcacacctgtagtcccagaactttgggaggccgaggtggaaggactgcttaaaccagactgggcaacgtgaagaaaccccatctctacaaaaaatccaaaaaaattagccgggtgtagcggtttgtgcctggggacccagcttctccagaggctaaggtgggagaatcacttgagcctgggaggctgaggctgcagtgagctgtgatcatgccactatactccagcctgggtgacagagcaagaccctgtctcaaaaccctctcaagttgtagataactactgctaacattccaatgagtatcccttcagat

SEQ ID NO: 787 - DNA, 1294 bp, Homo Sapiens
ctctgaggaccatccacctccttcctgcgccctccccacagctacggcggggcagagagaggtgatgcgtgccagggtcgggagtcacagaggcttttgtacttttttttgtagagatggggtttcgccatgttgcccaggctggtcttgaactcctgggctcaagcaatctgcccgtctcggcctcccaaagtcctaggattacaggtgtgagccaccacacccagccttagatggtgagtgtttattgaacacccatagtgtgcctaaggctgataggcatggaggaaacagaactgaagaagagatgtggctcctggctccatgaagaactgggtgagatgacatgcatgcaaggacttagcacacagcagatgctcagtgggtgtaattttctctctcttcctatttgtgagtcgacatgaaaactgcttctctgggtttctgcctccccccatgccctgcattagagcaggacagaatgtgtgccaccgtgcctgccattttaaaaaattttttgtagagatgggggtctcactgttttgcccaagctggtcttgaactcctggcctcaggcaattttcccatctcagcctcccaaagtgctgggattacaggcatgagccaccgagcctggaccagaatcttacttctttcttgcaccatggtccttcgaggatcctgtcatgagtgaccttccatgtggtgattcagcggcccaggcgccttccatctcatggctctgccatcttctctggccttggggagtttcatctctagctggtggttggggaggaaagagagctgaggactgcatgggaactgttcatgggctgagcctagaagtaatgtacatcacttccacttccaattctattcatattctactggctgaaactctgaaggagaggctgggaaatgtagtccagctacacgttgagggagagagtgaacaggctttggtgaccacacagccatctctgctcagatacccaaggaggcaaatagaagagccagtccatgccttcaacatgcttgctccacgacctccctgagcacctgtggcctctgagtttatggtcagggtcaacagtgggggaatctcatgccaccaaattccaggctggcaagagcctggaaaaccttttggctggagagcccgggtcacctgctgacttatgaaagcagtgaaatcagtggttctcaacctggggtgacattgtctccctagaggacatttgacaatgtctggaggcatttttattgtcacagctcagggatgctactggcatct

SEQ ID NO: 788 - DNA, 3223 bp, Homo Sapiens
cctagaacagtgcctggcacataatgtggatgtcagtcaatgttggatttacttgtgcttgtttatttaaaaactatttggggttagattgtcaggaaccctgctacatgttgtgtaaggcttctagtgtgtacgtgtgtgtatttcatataatacatttatgtgtatgagcagttggaattgatcactaaaatatttcttaaaggtaatataagtacaatttggtatgttgagtatcatgaatgaatcaatgcaaagattcaagtatctttgggtagaatcatgtcctttgaaatgtcagtgtacagtaaaaaggtctgacatcataactagattataaatcctatactcttgtactccaaagtcagtatagttggactggcttgtatgtcctgtttgacaaaatataaattttactttcctgtggcaattcccaaactgggctgaccacttggacttttaagaaaatgtaagcactcttgggcattgacccaacgattttcattcactagatcctggggtggggcctaggaatctgtgttttttaataatttcctttctgtaggtgtttacatatagtcagtttctctgctacccacctttcatgatatactttgaaatttggtgacaatcaccttggaccttttgggttctctggaaatggtaaccagtaaggtaattaataattaatatcttatactggtagagggaaagaaatgctaacatgtgtcatactaaagatcttttaggactagtgctgactttctgttcatatatttcactggaaagctattgtcaggacattttgcggaaggtgttttttaaaatgtggcatattcatagagttgtattgctggaagttaccttagaaatcatttagcttattcccttttatatttgagttaatcttaaaaatgttagggttagggtgtaccacttattagttaagttgcctcatttctcttagccatggtttcttaagcataagatgggaatgataatacctacctaccttatagttttttttaaggatttaactgaaattcaaaaaaagttgctagcatacatcttgtttgtagcagtgtagcaagtgttcagtaaatgtttaatattttgacatacctataatatgatctatggtatacataaaagccaaaagaggtagaaaaagttatagtaattaagttcaagttaaaaatgttgtacacccacaggcagagttttatttttaaattatggtataatacttacacaatacaccattttaaaccattttaaccatttttaagtaaatcattcagtggtgtttagtacagtcagtgttatgcagtcatcactgtctagtttgagaacattcttattaccccaaaaggaaacctgtacccattgaggagccacttcctattcttttctctgtatccgcttgcagccactaatctattttttgtctttatggatttgtttattcagtctctttcatatgagtgaaataataaaaaatgacttttcactgtataatgttttcagggcttatccgtgttgttgtgtgtatcttactgcataacttccattttttttaaatgaccgaataacattccattgtatggatataacagccttgtttatccagtaatcagttgatagacatttaggtcccttccaccttttggctgtgtgagtggagctgccacgaacatgcatgtataagtttttgtttgaacacctattttcactttttgggtatacacgtgggtgtggaattgctaggtcttgtggtaattctatgtttaacttactgaggaagtccaaactgttttccacagtggctgcaccattttacactccattagcaatgtatgagggttccagtttctccacatactggccaacacttactttctgttttttttttttttaattaaattttatagccaccctagtgtatcttattgtggttttgatttgcattttgctgatggctaatgacaggcatctttacctgtgatttttgaccattcgtatatcttctttgaagaaatggctgttcaagtgctttgcccactgtttaattgggttgtctttttgttgttgaaagcagtcttttgattatgaaattaatttatgtattcttctctagggagcttatttggaaatatatacttggtaatataaaaatttatttcggaatataaaataaaggactggacttcattactttttaagtaaacttttattggatgcttccttttaatgtatttttttttgtagaaatgaaattgttttaattttatagcttagcctgatgcctgattccatgcttgcactgactctctgtctgcactaacaaattatcagatttattcctttccaaaatatcattgattttttttcagatcatagaatattcctctcccaacttttttgttgacagctttactgaggtgtaatttacatgccataaaatacacccattctaactgtacgtagttcagtgatttttagtcaacttaacagcattgtaccacagttaacacaatgcaatattatagcatttctatcattctgaaaagttttcctcagaccttttggaagtcattttctgttcgcgccccttggtgaacactgatgctttctgttactcttgatttgccttttctgagtatttcacataaatggaatcataatgtatagtcttttgtgactagcttctctcactgaacgtgtttttgtggttcatctgtgttgtcgcatgtatctgtagttctattttttattactgagtagtatttcattctgtggataataccacattgtgtttattcattcactagttgatggggatttggatcatttctagtttttgactattatgcataatgaacattcaagtacaagtctttgtgaggacatcctctttcaactttttattttgaaaaatttaaaccccacagaaagattgaagtaagtagtatagcaaacacctatttactcttcacctagattgactattaacatttgcctgctgttctttgcctttttctataaatataccttttccagaaccatttgtagatattatactttatctcttatgtatttcagcatgaatttcctaagaatgagaacattcacatacataaccacgattttatcacacttaagaaaattagcagtaatctcatgtcagctactttatagtccatattgaaacttgtcccaaaaa

SEQ ID NO: 789 - DNA, 1392 bp, Homo Sapiens
gccatctcggcttactgcaacctccgcctcccaggttgaagtgattctcctgcctcagcctcctgaatagctgggattacaggcgcccaccaccgtgcccgctaatgtttgtatttttttagtagaaagacagggtttcaccatgttggccaagctggtctcgaactcctgacctcaggtgatccatccaccttggcctcccaaagttctgggattacaggtgtgagccaccacgcccagcctgagccaccacacccggcctgagttcgccttattgtctagaacccaggtgaggatggagtgaaggtggtgggtgtggaagagcatgttagctttgcttctaggaaagtaagtggagctatcagcctgagctctgtgagcatgcataaaaggagtaacaagtcacttctctcaatctttttttttttttgagacggagtctcgctctgtcgcctaggctggagtgcagtggctccatcttggctcactgcaacctccgcctcctgggttcaagtgattcttctgcctcagcctcctgagtagctgagactacaggtgcgcaccaccatgcctggctaatttttgtatttttagtagagacgaggtttccccttgttgaacaggctcgtcttgaactcctgtcctcaggtgatccacgtgctagggcctcccgaagtgctgggattacaggtgtgagccaccatgcccagctcacttctctcaacctttgaggcatctcttgagttgctcaccaagaagagagggagaaaagagagcaaacagtgtacagtaagtcaagaagacgatgagtgtaatgtaacaaggtagggaagaccaagaaccttttggagcaagatggctacattaggatttctggtcagtcaggtcacataaataaggcagataggaacgttgacactgggaagacaccgttcccagaagccaaatagacaagactatctggccagtcagatacacggttaaactaacagacttttaaggaaaatgaatatgttatttgtacttacagtcaaccagccaaactattatcgatattattatatggcaacaacatagcatctttctagaaatattaatgaacaaattaggaattgtcataaaacagcaaaaggggcagaggaaatcaatgaagcacactagagtttaactctttcccttaaacaattgagtttttaaataagtaaatcctgtgactcccagactgaggcaggaggattgcttgagtccaagagttggaaactagcctgtgcaacatagtgggaccctatctctacaaaaaataaaaaattagccgagtgtggaggcacgtgccagtaatctcaactattccagaggctgaggcgggaggattgcttgagccggggaagtcaa

SEQ ID NO: 790 - DNA, 4067 bp, Homo Sapiens
acgcccagcctaatgtttttcttgactcagtaagattaacaacatctgcttgggtatggaatgtgtcttcaggactcacgcctctcaggagtcacagtcctgtgcagcctgctattcagtatcagaaaatactttccaaatatcccagttttctagctgcttagggcaggaaggtaaatctggtccctcacagtcagtcatggccataagtggaaatcgagtctcttcatgcccaagagcacatcagagaaatggagagtgctcctgaatccgaaagggtcacacagacaagagtgaagaatgtctcaataaataccagtgtggaagaatgatcttgaggaccacatccttcactctctctccttcccccctccctttctgcacatcttgcatctcagaagccccctcccggaaactagatacaactccaggggaaggtgaggttgaaatccacaagttcactgagataaagtttctgacaatgcaaagaaagggaggcttgaaatcaaaattagtttctatttcttacataaatgtctggactagaattgtgtccactgctcagatcttacttatattcagggatgacgtatctcatggaagaacagggctcaacgagccacttaaatgtcttcctatcaaatgttaaggttctagaaaccaaatggtgggtatattatccaacatatgccgtgaaagcagagccaatcctgggggaaagcttctctcctaatggtaaggtgtccatatcctctgccccaagaaccaagacaagtgatctgacaagtgtgaagactgcttttcaacatgaaaaagagttttcttaaactcaagcatgatattggctctactttgaatatcagttacgaaaattcataacgagctgaggtatcttcactaacattgcaaattaatttcttgtattcatcacaatgacatttatgtgtatttgaaaagtaatccatatggatgagcatatttttcattcactctacagacggaacatgcacgctggtttgcagatcccttgcagtgactctacagctcccaggaatctgaggttcacaaggtgaaacctaccaggccaaacaatttaaaattggttttgttttgaaaatccagtaagtatgatggcaatgtcttgcagaaattcctcttttagtattccagtctgtgggctctggcagaagtaatagtctgctgcaaacagatcactcttttttgtttgcaaagtcttcgtaccagctgaatcacagcttgcttttcacttttcgtaacaccttgcaacatcgcaaaatatttgctggagtttgtgaagggcggctgcagaattagtaaactgaaaggaggccttcctttactcccaccccttcaatgccgcttgtccttggtctataccttgagtagaaagggactagttaacttgctgtctccttgaatgtgttttctgtgagggtcagccctgaccaccccagtcacaggaatctttctggcctccggattcctagtgctcatattgtatatatcgtccacaaggtacttaggtactgttgtatattggtatgtcccatatgtgcatgtcttctgtccccaaccagattgtaagcccatctgtgtttgctcagccctgtgtgtgcaacagaggtgctgaatgaagacctatcgatgattgattgatacgttaaagattatttcctccttcctcagaatgctacacttcgctcatcaatggagctcaagatgtaaaagtctggtttaagagacattgaatctattctgccttttattatccctttcttataagttgacttttaagaaatcaatgactgtgtggagagttctaactgggtacgtaataaaataaccaactgtgggggtgggcagggggccctatcgcaccaggaagcttgtttattggttgcattagaccactaaagtggaagcactgagatattctggaaagaacacagcttgggggccaacagatctgggttcagagccttactgcatcacctacaagttgtgtctctttagaaaatttacttaaaattactgggaatttatttcatcatctgtacaatgggctacttttttctgtgattgttgtaagaattgtaataactgttaaattatgttgcttatactcttgtggtttaaaatgtgttgcagctgctgctaaattgaaatgatttgggggatcatttggagaagagaggttatcctctggaaatctataggaagttgcaaggattaataaccactaaggagcagaacattgctgggtcagaaaatagctgcaggacttagaggttttctgcaacacaggactttcagcttcaaaactgggacattctcatggcaaactatggcgattggtcacctggcagtgagccagactgggaggatctgatgtacccatggaagttaggccgaaacacttattgaaatctggggtcaatttgaggccttggccacagaccaatgcagaaaaggtgggcaaagcgtggtacaacgagtaccttggtactcagtccctagattaccaacctagagcacctgctgtaggccttgcatgcagaattagttggccccagttctgagggagggctcactagtccctagttcctctcaaaagaatgagggtaataagttatgacatctcctcatagatttgttatgcagattagatgggatagtctatacacagcacttagcaaaggatcagaaacattttaagcactcatacttaaacccaaagtcactcactaggtaattggcgtgataagatacatgggctataattaccaaaaatatagctggtaatttaagaaaatggccaaatgtgcaaggtagtaaaagtctagggtggggcaggggacataaaataccataggaactgaggaacagggggtcaggtctgaagaatctgttttgcatgagacactttgtaggcctttggagagaaattgtgaggaggacttgaaggacggacagttggcccccaaactccaggctttcactccctgaactaagagggaccttgagcaagccttcacctctgggaagaagccctcagcagcccagataggagagctgaggtgtctggaaaagcccacaccgaggcccagggctgggccagttatggaaggccatcagtgcagccccgtcttgactcttgccaagacactaacatatataacaatatgttatgcaacatattgttatagtatatatattagttaaacatatagtgaataatataacaatatactgtgtccataaacaatattttagttctgtcaggtttttatctttaagtgaaggaacacagtatatttttctttttcttggcctttgtcaatatttgtgagattcacccatattgaagcatgtagttattgttcatttttactgccatatggtattgcattggatgaacatatacaaatttacaagtttgtttagtggtggggatggatatttgggttggttattttgaacacatggcacaaaacattcttgtacgtatcttttggtaaagatctttcttatttcatttattcaatgtaccaactcaaatgaaaacgtgcctactacatggcatggaagaaacaggcttcttgtcttatctcgcacagtctgcccacgcaaaccatctgtccagccaaaccaaaatagcactgtgcttccagcctctgcaccctggctcctgccttgtcgctggcttgaaccaccctcccccaactctctgcttaatgaaacttaatcatcctttaatccgaagctcaactgtcctgtcttctatattgccttcctgattattacagcaggaagtaatttctcttgctcgaaatgcagttaattaaaaaaatgggcgactttggtgccatcatactctgccttggattgtagtgttttgttggtgaattttatctccccaagtaagctgtgggcctgaagaaggcagcaactgtatttcacacatcttagtattcctcacagtcttgcgtatgatgtaagctaaatatttattgaatgagtcaatgaaagtgattttcagtgttgag

SEQ ID NO: 791 - DNA, 2126 bp, Homo Sapiens
cccatctctggcccatgcagcctgagcccagagttgacaacatgaccatcagtcagtccttccctggacaaacagacaaagctcctcatgccagcacaacacttggtcccagggctggcagccaggagcacagagaagaacccacagacactcacagtgaccccaggaagacagatatccatgcagtgtggcagtgctgtgggatgcaggagcaggctggacctgaggttgcattctgagcaccccagggaccagctgagggcctgcaagcacagcgggtagcctcttttctgggggtagtagcagtggcccctgggacttgcagctgggccctacccagactcccccagggctgtgcagcagtcatccacacttgcagccttctgcagaagactggagtgccagcatccaagggccgagcagtgcaggggcctgactccaactcccctgcctcagagggaggctagctgtggggtcagttgacactccggagtccccatggaatcaggctagacttccgctacaactgcacttctgtccagcctcctcctctccctgcatggtgcttgtccttcccacacagatgtctcctgagagcataccctctctaaaccccttctatcagaatccccagcccatgcactgagtcatagccctcacaggcaggaacgagatgagagggcacagaacaagcactcagaagccaggtgccaccgctgcacgttcaggggctcaataggccagaggaggggggcgtcctcacctccaggaggtggaggtgctccccactggggccatccagctgagccccaaggtgggagtgtgcattcaggaggcacacaggcaggggaaaccactcacaaaggcaggaagggggatggccagctcaggagctggacggaggggcagggcggggacggcaggaaggctcggagagatgaagggaggcaccagagaaccacaccacctgctaacatgctccctagagcacgggagcgacctggcctcaacctctgcctctgcccctctctgcagaccccagaggctcactggcaaaatcagtgtaatgatgctggcatcaaaaagaggcacattaagtcacatgtcagtgaaacgcccagcagagcccttggacagtaggctggtcaggggccctcccagcatctgggtataaatgcacacacccagaatgaatgtgtacacccagagcccccaggcacatgactgtacaccacacccaggcctgggcaccggcagggtggaccgagggcaccagcctccccacacctgctgctccttcctctccactctgcaacctgggccctgcctggcactggtgctgtcctggagatcccctcctgtgtcttcccctgacagcgtccccggttgcctcacataagacagctctgcactcggtgcaccaccggatgcatctggcgtcctgcccagggctgagaacactgtgctgccctggagtccaaccctgggtgctatggcaggccagagagccactgtggaaccctggtccccacgggcaggggctctccagacgtcagcaggcagcagggcatgtagccctcgacggccgtgatccacagcgctcagcattctatttttatcatttaaccccaaactttctattccattgtttctttgacccatcattcaaacatgtgtttcaaattttctaaatatacaactcttttagagttatctattttgttatcactttctctcttaattgcactgtagtcggaacacttggcccgaatagcagcttctttgacatttgtgcgttgagtgtcccaggatgggaggaggagaaccaggggccggccaagcccaggaaatgggtgtctgggaacaaggcagtggacatccacggcggtccaccgggcaggggtggccacagcagcagtcacacccccaccccgtccatcacagcacaggccccgcttgagtcctcacacctgtccactcctggccggtcacccctcacagccctctgtcatggtgcctggaggggagggcctctgacacccccagcaatccaccagtgggtatcagaggccctcctctatggctgtcagcccaccagtgccacttcagtcccctccctccgcaca

SEQ ID NO: 792 - DNA, 1477 bp, Homo Sapiens
acacaaaggacgcaggaagaacaggtgcgcacaaaggcacaatggcggcagatctgcccgtggatcactgaagattcctgctctcctgctgaggtggagattgcagtgaactaagatcacaccattgcgctagagcccgggcgacagagcaagacttggtctcaaaaaataaataaaataaaataagtacaataaaataacaaaacaaaacaaagtaagaggagatgatatctggtcgtgttttatggccatctggtaagctagattctttcctttggttttattgccaatcaatgattagaaagaagcagtttgctgttggcttgtttttcccctcaactaaatgtaagaaaaaaaaagagtcaaaaataccgaagctaattttaaaatgtatgtatagagagagacttggtcttaccttgtcatccaggctggagtgctgtggtgccatcacggctcagggcagcttcgacctcatgggctcaggcaatcctttcacatcagtcgaccagatagctgagattacaaatgtgggaaaccacaccctgctaatttcttgtattttttgtagagtcggggtttcaccttgttgccgaggctggtcttgaactcctgggctcaagcaatctttctgcttctgcctcccaaagtgttgggattataggcatgagccaccattcccgccgaaatatttttgagattcatagagatgagtaggtcataataagagtgcacaacttgtagttatatttaatatcttttgaaattactcggcacccccattgtaatttaaatgatttgttcctgacctggttttactttgttcctgagggttgcagatcccttgaacaatattccacgaatgaagcagtgataataaacctgcagctgccccgagggggcgctgtgcggaggttcacaaagggacctgggtctccctggtgcggatgcgggggccgcctccattctgctttctgacactgccaccgcggggccaggcttgatgtgaccccatcactgctcagttcactacacagtttcatcttttgatatggaagatttgactccatccacgttccttaggaggttactggaaatgacagcgctgtaaatttctgggtaaatgagcagccaacatttttgggagctgtcacacaaccacactgcccttccctctgcctgaaaacctttaggcctgattgactcggagaaagcccattaaactcagcccccactgacttgttcatttccactcaaacgtttgtgatagtcccaacacaaggcttgtcctccaagggacaacttgtaaacacttctaagagaaagggttgactgggcccggtgcctcacacctgtaatcccggcactttgggaggccgaggtgggcagatcacttgaggtcaagagtttgagaccagtccatgatcttggcttgaagaggcaagaccctatagtttattgaacattttaagcccac

SEQ ID NO: 793 - DNA, 3379 bp, Homo Sapiens
agcagtttgccacgtttaggagctggaggattcacttgccattccacagagttcttcttctttttttttttttttagacaaggtcttgccctgtagcccagggtagattgaagaggggcgattttagctccctgcaacctctgcctcctgggctcaagtgatcctcccacctcagcctcccaagtagagtagctgagtagttgggactacaaacacacgcagccacacccagctaatttttgtattttttgtatggatgggatttcacaatgttgtgcaggctggtctcaaactcctggactcaagcaatctacttgcctcaaaagtgctgggattacaggtatgagtcactgcgcctggcccaaagagttcattaacgcttcttgatctaaaataattactcctttcttctcttggacaattcaagaaaaaaagatatatagctattcatgaatgaaaaaaaaaagcttctcttatcttaggcagtgagacattaagatttataaaactatatactcccatcctgagctaaaaccacaaacagtattttgacataactgtgctagaaggaaggaaattgggaattatattccaatggtaataactactattattctcaaagtatgttcatacctctacaattttatctttacagacatatgttagcagagacatatttggacccaacctatatactttttctctataaagcattcaaagaacaatgtgacgattacagttgtgtggtaagaaatattaatataaagaatgtattaactgtaaattgattgttaaagatattttacacattgtggttgttatgttgtacaaatgtcaaaaaataatcttgggataaattgcttacttataatcacttgattaattgcaatttttttgtgtgtgtcagatatgcttttatttcatcctgatgactagctattcagagataaatgtaatgcttacagtacctatattatcctagatttctttctggtttacttaataacattttaatttttaatatctattttaaaaattttactctacttgtatcttttaaaagactctaattcttcctgaaagcagaaatgtatagtaaaataggagaaatcattcttacatgatatggttttacatgatatccagaatgctgctggcttccagtttttttgtttgtttgtttgtttgtttgtttgtttatggtgtcttgctctgttgccaggctgcagtgcagtggcgcgatctcagctcactgcaacctccgcctcccaggttcaagtgtttctcccctctcagtttcccaagtagctgggactacaggcacacaccaccacgcctgctcatttttgtatttttagtagagacagggtttcaccatgttagtcaggatggttttgatctcttaacctcgtgatccgcctgcctccgcctcccaaagtgctgggatgacaggcgtgagccaccgtgcccagtcacttccaattttaaaatagagaattcgactggctaggccaatgtctctttgagttctcacactaagtttttcttgttgggtagttgaattagaagaagttatcctaggaatttaggttaggcatggtggctcacgccttccatcccagcactttgaggggccaatgggggcagactggttgagccccagagttctagacaagccagcctggacaacggtgaaacctcatatctacaaaaattacaaaaattagccaggcatggtggcacatgcctgtagtcccagctactcaggaggctgaggtaggaggatagattgagtcccgaaagtcaaggctgcagtgagctgtgaaggtgacactgcactccaggctgggtgacagaacactgagcaagaccctgtctccattaaaaaagaaaaaaaggaaaaagaaaatttcttctaggaatctagtctctaaatacacttatgggtattttctcatctactctttcaaattctgatgattccttttacaactcaatagtagattaggacagagtttccaagttattcaactgagatagaatttgaacattattcatgatttttggctaagacagtctaggcagagagcagctgtggcaatcagaattcttagcaattgcctgactactactagtctgacagagatcttcctttggccaatgatttctcttttctctcatcttcattttcttgcctctcctttgcactacctccatcctgtaaccctaatcagatcgtccacaattccagagccccagttccttttataatataattatatataattataataaaagttactttttaaattgagggcatactctattagagccactctgctaaccattttgcatgcattacgatgcagtctcatgttttatggattgagtgaccatgtgttctgtttttcaagaacaattctatttatcttgattgtactggtatacttaatcatagtgctccctttcattctcagaagtgacctggttaggacaataaccgatatgatcattacatattttattagcttcccagggctgttataacaaattacaaaacacttagtggcttaaaacaataaaaatttattctttcacagttctggaggcaacacgtctgaaatcaaggtgtcagcagggctccctcccaaggctgtaggggaaagtccttctatccctcttccagtttctgctggtgcctgactctcttgatttgtgacagaataactccagtctctgcctccatcttcacatggccttctccatgtctctgtgtccttttctcttctgtttcttataaggacactttctcttggatgacaatgacagataatctttctaatccacataatcttatctcaacatccatcctcaccttaccttaacttaccttatctgtaaagaccttcattctaaattaggtcactttctgaggttttaggtagacatatcttttgggggctataattcaaccaatgacctatagatacatgtagtaagtttttaaactggcatattaaaaatatgccttgttaaaattgcctttgaaaaatatctccatatctgtgagggattgcttccaggaccctcactaataaccaaagtcttagcataatcaaatgctgtagctggcgctgcagagcccatggatacaaaaagtcatcattccttatacgtgagtttcacatctcgagaatactgcacttcccacctgcattttgttgccaatgtggaacctgacaatgtggaggcctgactgcacttattgaaaaaaaatccgccataagcgggatttgaactgcccattcagttcaaacccgtgttgtgtaagagtcaactgtataaaataatttttattcacattaaaatttgaaactgc

SEQ ID NO: 794 - DNA, 1492 bp, Homo Sapiens
tcacgcctgtaatctcagcactttgggaggctgtggtaggcagatcacttgaggtcaggagttcaagaccagcctggccaacatggtgaaaacccatctctactaaaaatacaaaaattagctgggcatggtggtgcatgcctgtagtcccagctacttgggaggctgcggcagtagaatcgcttgaacctggaaggcagaggttgcagtgagctgagatctcatcattgtactccagcctgggtgacagagcgagactccgtgtcaacaataaataaaataaaataagaatttattttagtgtattcatgaaaattgattttatttacttttagttaatgtttacagagactggaaaaacttctgactttatatacattttcataaacatttttctttcaaatgaacccttgaatctacacattgagagccttatgggtaaatacttaaataatgacaacacacttatatagtattttctacatgccaggcactgttctaacccttcttacatatatgagatcatttaatcattatcaccattttacacatgaggaccttaaggaacaatgaagttaaagtaacttgctgaaggttgcattgctggtaattgatggggcgtggaactgaacagtctggctgccgagccagtgtttttaaccactgtattatattgtttcatatttaaatgacttcataccatgatattgtgacagtttataattggaacaagattcattctaggaagaatttatatggagtatttctaagaaaaaactgtgaaatagaaaagtaagtcagaagtgtgttaagtgtgtttagcaggttattagcttcctgctctattataaactgatacccacttaacaattttagttattttttaaaagttgtatattttgtatataacaactctgctgatgtagtcagtaattagttgtcagagttataatttctgtttggtttgtttttttcattaaaccaagaatcttatccattttatatccctactgttcaggcacataatttgttacaattgtttttaaaaaatgcacaggagttgaacttaatatgtggctcacagtgttttgcccattataggtactcaacaagtgtttattgagatattgtgttaaataataaattgaactaaaggtacaaccaagaatataaattttagtaggagaactttattctcttttattaaaatttaaacgtagaaagttgtatgatccaagatgggttattatctgggaagaatttaatattcttagaaccatattgttgaaaatagctcttagtaattcccactagactgtggcctcctttgagggcagagactaatttatttatcattatctcagcacctagcacaatacttgaaacataataagtattccgtagtatttgataaatgcatgaatatatttaatattatatttgagaacatgtgatatatcatataccatgtaataaattaattttgtctgtt

SEQ ID NO: 795 - DNA, 910 bp, Homo Sapiens
tttagctgtcagggatcctgttgcagctctgcctcagccagtctgtgcacagagcatggagcaccagggccatggagcatgtgggctatggaatcgggttgcctattttcatcttgactccatcacttgctgggcaaccttgactcaatgaatgacatcataaaaatggaacattcaaatgagaatgtccaaggacctgctgacttcactgatgaattctaccaaatatttaaagaagaactcatattttccaaaaaaccaaagaggaaggaatacttccaaactctttttacaaggcaagcattaccctgataacaaaactagacaaggacactgcaagaagagaaaattatagtccagtatgcttcaagaacataaatgcaaaaatcttcaacaaagtaccagcaaaccaaattcaatagcacattagaaagaccattcaccgtgattacatgggatttaaccctagggtgcaaggatggctcaacatatgcaaatcaataaatgttatacaccatattaacagaagggataaaaaccatatgatcatctcaatagtttcagaaaaagcatttgacaaaatgcaacattttttcctgattaaaaactctcaacagattcggtatagaagaaatgtacctcaacacaatgaagcccatatactgcaaacccatagctaacatccaactcagtggtgaaaagttcagagatttttcctctaatatcaggttcaagaccaggatgcccactctcatcacttctatttaacatagtactggaatttctagccagagcaattagacaaaggaaggaagtaaaagatgccaagaacacacaatggggagagaagactttgctaagttgtgctcagaaaactggatattcacatgcagaagaataaaattagacc

SEQ ID NO: 796 - DNA, 3022 bp, Homo Sapiens
tgggaggaagccccttcacctgatgtcaaggggagctggtggccggggttttaccacacagcccttcagcatcacccctgaggtcacgtgggtgagcaatgcctcagtgggctgggggtaagaggtgcctcagtgggggccggggggtgtgagtggtgcctcagtgggccgggggtgaatggtgcctgcacagctgtgcggggtgtgcctgggtgggtagtggagcttcctcagcagagaatggggtgtggggatctcagggctgcattcccagactctgcagagagtgaactctggagagtgaggccctggggttctgttgttctctgggaggaatggggttggggccctcgtcagcagggcccatgggcaccacagtgagaccctgggctgcctccacacgaggactcaccttctcccccttggggccatcgctgcctgggctgcccttggtgccggggtctcccctgcgcccctgcagagaacaggcgtgtgggtgagggagggggctgagtccaagcccagagcctgtggagggtgggggctgtgccggggccgatgctccttctctacaggagggctctggctttgggacctgggacctcgatccccaggctccttcccaacagcctcagcctgcgccagtggctctgctgccagccctcgtccctctgctgcgtcggtcccgcccatgccgaggatttaggaatgatctggggaggctccaggtggagttggatgtctgagcccaatgcggcaccatggtgacagcagagatggtggccagcgtgactgttcatctgggccatgggcgtgagtgtggccagctcagctgcaggcgaagaggcagaggggctcaccttgcttcccttggccccgatttctcccgggggccctctgcgtcctgggcggccagggtccccctggaagggtttgcagaatcagcctcacgtcttttggcaggggaaggggggtgcaggatgcccgctgcgggggcaggacccacggtcgggcttgggactgcacctccctgatgtccacggggcacctgggatgccagatgctggctgggggctgctggaacctccgtgccagctgagggcagagtgtgtgtcacgggcaggacgcctgtgcatctgctcagaggactcagccagacttgggcttgggctgagggaaggtggacagaaagtgggaagccctaagtccaagctcccagaaaaaagcccttggggatcctggggccgccaggggcggggcgacactgcaggcggcccaggagggcagagcccctggggcaccaacgttcccatggggagctccaggaggtgtgggtggggctccctggggctccacctgggaggaggtgggtttgttgccgaggcctcggtgagcagcggcggggccgcccaagccctggttagaagctgatgaagcaacgggcagggcaccctccaccacatcccacggccattggctcctcactgaccagtgtttccagaaaggccctctctgctcagcttctcagctggggctgcctccaggaggcccctggaagctggtgaccccgcctgccccgtaccctgacaaggccacttaccttgccgccttggtctcctcgctcccctggactccctgcttcccccgggtaaccgtcggggccctgagagaggagtgagaggtggagctcggcacacggcgggtggggttctccccatgagccagggcccaagtgctccattgtcccagcccgggacgcacctcccaccctcactgtgaggcccaggctcagtgaccaagaggccaggcctggatctgctgctcagggaaatggagctgtccagtgacaccgaagtttgggatgcatcaggtctccaggccacggggatccgccaggagctcccagggggagttcctcacatgactccgacccggcagaatgctgggctggggctgctgggctggggctgctgggctgccgggagaacccacgctcccactgcagcagcaactaccctcccacccggtcaggcacccacaccccctgggccgaggctgaaggaggggtgcaaacggcccttacccggtttccagggtctcccttgcagccaggaggtccgatgcgccccagcttgccctgaaggagaagggggcaggaggagtctcagggcggggttctggggtccatgtgtgccaacgaccaagacacagcccacccggttctgccccgcagggctgcagcgctctcctcctggcacacgggtgcccacatgaggccacggctgctgtggagctgtctccggggaggcagagtggccgttgtgcaggaacaggccatccctggctgcctcccagaggccctgagggcagagctccctgggcacagaggatgttcccacggggagccatggaaggagtgggtggggctgtcctgtggtttgacctgggagtgggtaggcttgttgctggcctctgtgtgcagctgtggagctgccccaagccgggatgtgcagccatgaattagatgcaggctggtgaagccctgggtggggcagtgggatgtggcaggagctgaagttcgtgtgtgtgtgtgtgtgtgtgtgtgtgtgtatgcgtgtgtacacatgtgtaagctgacagatcaggctggatctgggggccctgcagaggctgggatgcctctgtgagaccagtccagctgtgagcccgaggctccctctaccttctgtccatcggtcccgttcttgccagccaggccaggggccccctgaagagagaaggaagagggaactccattagccccggtccttctgccctgagcagcaggaaggaggggctctgcctacccagccagcctaccttgcgaccgtcggctccaaattcaccctgtgtaggaggaaagccggcgcagtgagctcggtgcctcaaagcatcatgggcactgctgcctctggggggcaaagcccttgggccaaactcaaggccacaggaccccccaggagcccccaaagccaccactgag

SEQ ID NO: 797 - DNA, 2300 bp, Homo Sapiens
cctctgctggtggaggacaatgaaatgatggctttgaagctgacaacaccatgggatggctgcggtgggctagggaaaggagggtgtgcagcaggcacataaactttctagagtagtgtgggttgcaccactgcaggcatgaggtggggcgccccggtgtcacaaaagtccgatcaggggacatatggtcctgccaggagctaagggcccagagcttggccaccgtgcagagagctgggcgaagaggaagcgccgcagccagtggacttggttccactcagctgcaaaaggaagagagttggtcaagacgacgtctgcagtcccttcactataaaattttgcaaaatacaaactgctcagtgggtgtgtagttggccgaaggtactccaccaaagaggtaccaaaagctggtgggcttcaaagcagcatcgtccccagcagccaaaaagtgggcaccccaagtgtccatccacagatgatgggtaaacaaaacggggcctgtccatgctaggaaatatgacttggccatcaaagggaatggagctctgacacatgccacacgtggaccttgaggacatcatgctgagtgaaacaggccagtcacaaaagcacaagcacaggatgattccacttatatgaggtccctagagtagtcaaattcatcgaaagtagaatggtggctggcaggatctgggggaggggagtggggagttagtgtctaatgggtacagagcttcagtttgggaaaagttctggtgttggctggtggtgatgattgcacaacaatgtgaatgtacccaatgccactgaactgtacacttagaaatagttaagaaggtaaaatttattaagtatattttagtaacccctccccccgcccccgccaaaaaaaaaaagcccatgtgcacagtggtctctgctgaatgaagacttgaaaaccagagcccagccctaaacagctcatgcatagtccaggcagagaaacagagcaggtaatgccccctcaactgatggcagacgggccagggagccctgctctgggctggagcagggaggcaccttcagggttgtgggagatctgcagggagagccacttctccctaggggtgggtgtctgagcaacagcaccagaatcccagcgacattctctccttcctccttccagactggctttgcctgcctctgaggctctgggaatgctgttccctccacttggaaggcagtttcctcacttcaccaattctttatcttcgtcatcccaaacccaacccacatgcaccccacaagaaaacctccccttgccagttatagactctcaaatcccccagaaattctgccctctgatgttgatcataattgtcatgaaatagctatttgtgtcattgtgtgacacgttctatgaaattctccattgcttccccagtactcattaaggaaatgctttttgtcagatggacagatggatggttgggtgagtggatggatggatgaatgatggatggatggatggttggatggatggatggaagcatggatagatggatggatgggtggatggatggatggtggatgtgtggatggatggatggatgaacagatgggtggatggatggatggatggatggatggatggttggatggatggatggatggatggtggatgtgtggatggatgaatggatgaacagatgggtggatggatggatggatggatgcatggatggatggatggatggatggacggatggacggatggatggacagatggatggatggatggatgggtgggtggatggatgataggtggatggatggatggatggatggatggtggttgggtggatggatggtggatgggtggatggatggacaatgggtggatggataggcaagcaaactgaagggtctacccacccaaaggggccaatgcatggagtgcctaggcctggataacagggtgcaagtatacgtgtgaatgggtgctttcgagtcttttgcctagaaccatgaattacagttcaggcccactgtcagtcctacctgacactgtgtggactgtggacctgtctgagaacggcttcctggatctagaggtttggctgaaggacagcactcaccatctcctgggaggatgagctctcaatctgatctgatctgattggcttggaggacccatcccagatggcaccatccaactgtacctagcacttgctgtgacctgggctggcactagctgagcacttcccatagaatagcaggagctacttttccctgttttacagacatggaaactgaggcac

SEQ ID NO: 798 - DNA, 1614 bp, Homo Sapiens
aagggggcagccaacaggaggctggtagaggagcttgaagaagctgcaaatgcggaatgaaagcctcccgcaacatccaggttgaagaagctaatttattgactcggcaagggcttattgtccctgacaacctccataggataaggcggccttcagaatcaaaatcaacctatgagaagattacccattcaaatcataaaagaccagatttaaaacaaagatctatcacccgaacatcgactagaagtggaggtccgtctgcttggaaattagtactgagaagagaaagccagcaaccagggatgaccacacactccagtccagcattggttacccagcctgagcatctgctcagcctgacactcctggctcacctagccgaataatactttatgaaatgctgaagagtttacaaggaaacatggggaaagcgacctgtggacaaaagtctgccagggtgcattccaccacgtgtgagcagagcctccgcagtgtgctccaacactctgcaaagcaggactgtggagaaaggacacatccatcccctgccttttgcttgtggtagtgactaactttctacagttttctcaatcaacagtggtccaagtaaactgtaattaaaggattaaaaatgaaagatgctccagttctgctttctttgttttaaaaatcactgctgcaatctgcttcaaaacaacagtgcttcttttcttgcccaaatttattcaaaatcttcaagttgtgtttagccgagaaggctctgcaaaggagaagagacggctctggtgtctctggtgggttttcttctcccgtactgcactgctcagtgtgggagttaattcaaattctcctgactccagattataacatccttttgaaaaatttgaaaacaagcaaacaacaacagccctcctatcctgactcccttctccaaaaacaacaacaaaaagccatgaaaaggcaaggcctagctctggagtaaaattcctgctaatattaccccagtaatatcgatgaaatgggcaaaccctgatgtcagtgcatgattgaactctagcacggccggcccctgcaaatgtaggtctgcggtgaccccgaagggagggcctgccaaccagggccactgtgcatgctgggtgtgatgaatctctcaccagaaaggctcctgaggccaaaggctggcactcttccctgaatccattttggaagacttgctggtcattgcaggcaaagctaagccagactatccctttgaaattccaagctcatctgtcaccaggctccatcccagtgtgccactgagctcactcttcaactcctcagggtggcaaccccaccacagctctccctgagcacaatttgaccttttgcatgattgaaattggtggaagtaagatattagccggcaccagtctgggattgccagtcccttgctgtcccctttattctttccttcaatgcagcccaggagcaagatggccttccctctccctttggactcaccgcttttgcagactcaagctccacttaaagcttactcagtattatcctttaaacgtgttttatattgttttgcctgcttttttgtgtgaaataaaaattaaccttagaatt

SEQ ID NO: 799 - DNA, 2570 bp, Homo Sapiens
gaagtacaatgttttataggttgtaattcagaaatacaagtacataagaaccatctgttagaggatatgccactgaaagggacaaccgactaatttaaaaattatctattgggtgatatgattaacaatatttcaaagaatttttttaagtgtttggttcttattaacggactggtatttcatttctgaccagtatcatgtaaaagcttccctaaaatttttattctggtttacacggattagcataaagatagagcaaaaatttcatctttgaaggagatctggttagatccatggatatctgaatggcattgatttataaaccaacattattacttgtgcgttaataatgaaatctaaaacttagtataagttcttaaatgaaattcatttgactttctgatatgagtgactcttaaggttagaaacatatgaatttagaaaaatgaaaccaaatgttttcaacaaagtaatttatttttttcctgagactaaattcagtacagtatttgtttttataacatccaacatgtcttatgttaaacttaaccactttctatgcagtgactgtggtgagatgatctattttatttgactaccctcaatgtaattcatttgggtagttctaaggcatatcagtgatcaaaatgtttctccctacagttactcttgcattctcaatcagtttcttctgcacatcatctaaagaaaatttatgtggtatgattacactctttttttttttaataccagaatttctaaaactaagaaaaacactaacatttaaaacatcagtgtttctagtcaaggatatttcaattaaatttcatcagtacattatagtttaactcatgctagaaatgttaaaacccaagatcttctgagtcacataataccaacatttcatattaacgaataaattactcaagttctatacaaagatactaagtgatgagaaacagaaaaagttaagctttcaatagttttaaaaaaatacagaagcaaactaatgaacacaactacgcaaaatataggctaaccaattgcaagctaaactagttagagattaacctttaaaaaatacattttagaacttagaagcaaactaatgaacacaactacacaaaatatacactaaccaattgcaagctaaactagttagagattaacctttaaaaaaatacattttagaacttcgtgacaccctcataaaaggcagcaaactaagggtattaaaacagtagtcattatttcagttactgtgcatcaagtctaaaagatccagataaagggaatgttttgtgattcaatttaaataactttaaaattggaaacatttaacaattgataatataattaaaatttaaagaatatacacaaatgatctgaataggttttatattcagtaacttgcatggtttttacactgacacttttatcattaatttaggagaatcagatgcatttccctccatatacctaggcattaagattccaaatttataaatatggtagtatagtattttaaatattaagtttgtacatgaatattgggtttatccgtattttcctttgtttcccaggtattatccagttttgtaaggaaaacactttgatatcacaatcaaaacttgtcttggttactaggctgtagccgtaattgggttacagtcacttagattcattatttggaattatacttaactaagacaaacctaaatgaaatttatctcctagaagaatttcacatttgcatttacctgcatggcagaatgagtttaagcacattttagctgttaggaaatatttaatttacttaaacttgttatctgactactcagaactctgagtagtcaactgtacctttgcgtttacttaaaactatatcggattcacttcaaatagaagatttttaaatagaagttagacttcattaaggtactggtattaactttaaatctgaaagaaaacatactgaaagtttgacaagttcattaaaacatttttagcatgtcttggtatatttatcagctttttattcttctttctgctggcatttccttaatgtttgtttgtttcacctctctggttcattggattgctactatttatgctttcatggactttatcttcacagtttactgtatcttgtaaaggctttaccacatcagctgtactggctgtttttggcaaggtcatctgcagtgcacaccacagggcagtgcgtgttttccgagtagccacacacatctctttaattgcagaagcaagggcaaaaacatctgtaaaataaacattcagggtcatttcatattaaatgccatttaaatatctgttaaatcttacaaaacccagtgcttttgctactaaatgatcaaatgttatttttgtaaaaaaaggatagttattgattgaaccaaagtcctgtcctttatcattaaaatatttaaaagtattgatactttatttctgacttgtacaatagtgactatagtttgagtagaacacagactgtcttgaaacagttataacagacaaaattaataaaatggaaatacttttggagtaaa

SEQ ID NO: 800 - DNA, 2569 bp, Homo Sapiens
gaagtacaatgttttataggttgtaattcagaaatacaagtacataagaaccatctgttagaggatatgccactgaaagggacaaccgactaatttaaaaattatctattgggtgatatgattaacaatatttcaaagaatttttttaagtgtttggttcttattaacggactggtatttcatttctgaccagtatcatgtaaaagcttccctaaaatttttattctggtttacacggattagcataaagatagagcaaaaatttcatctttgaaggagatctggttagatccatggatatctgaatggcattgatttataaaccaacattattacttgtgcgttaataatgaaatctaaaacttagtataagttcttaaatgaaattcatttgactttctgatatgagtgactcttaaggttagaaacatatgaatttagaaaaatgaaaccaaatgttttcaacaaagtaatttatttttttcctgagactaaattcagtacagtatttgtttttataacatccaacatgtcttatgttaaacttaaccactttctatgcagtgactgtggtgagatgatctattttatttgactaccctcaatgtaattcatttgggtagttctaaggcatatcagtgatcaaaatgtttctccctacagttactcttgcattctcaatcagtttcttctgcacatcatctaaagaaaatttatgtggtatgattacactctttttttttttaataccagaatttctaaaactaagaaaaacactaacatttaaaacatcagtgtttctagtcaaggatatttcaattaaatttcatcagtacattatagtttaactcatgctagaaatgttaaaacccaagatcttctgagtcacataataccaacatttcatattaacgaataaattactcaagttctatacaaagatactaagtgatgagaaacagaaaaagttaagctttcaatagttttaaaaaaatacagaagcaaactaatgaacacaactacgcaaaatataggctaaccaattgcaagctaaactagttagagattaacctttaaaaaatacattttagaacttagaagcaaactaatgaacacaactacacaaaatatacactaaccaattgcaagctaaactagttagagattaacctttaaaaaaatacattttagaacttcgtgacaccctcataaaaggcagcaaactaagggtattaaaacagtagtcattatttcagttactgtgcatcaagtctaaaagatccagataaagggaatgttttgtgattcaatttaaataactttaaaattggaaacatttaacaattgataatataattaaaatttaaagaatatacacaaatgatctgaataggttttatattcagtaacttgcatggtttttacactgacacttttatcattaatttaggagaatcagatgcatttccctccatatacctaggcattaagattccaaatttataaatatggtagtatagtattttaaatattaagtttgtacatgaatattgggtttatccgtattttcctttgtttcccaggtattatccagttttgtaaggaaaacactttgatatcacaatcaaaacttgtcttggttactaggctgtagccgtaattgggttacagtcacttagattcattatttggaattatacttaactaagacaaacctaaatgaaatttatctcctagaagaatttcacatttgcatttacctgcatggcagaatgagtttaagcacattttagctgttaggaaatatttaatttacttaaacttgttatctgactactcagaactctgagtagtcaactgtacctttgcgtttacttaaaactatatcggattcacttcaaatagaagatttttaaatagaagttagacttcattaaggtactggtattaactttaaatctgaaagaaaacatactgaaagtttgacaagttcattaaaacatttttagcatgtcttggtatatttatcagctttttattcttctttctgctggcatttccttaatgtttgtttgtttcacctctctggttcattggattgctactatttatgctttcatggactttatcttcacagtttactgtatcttgtaaaggctttaccacatcagctgtactggctgtttttggcaaggtcatctgcagtgcacaccacagggcagtgcgtgttttccgagtagccacacacatctctttaattgcagaagcaagggcaaaaacatctgtaaaataaacattcagggtcatttcatattaaatgccatttaaatatctgttaaatcttacaaaacccagtgcttttgctactaaatgatcaaatgttatttttgtaaaaaaaggatagttattgattgaaccaaagtcctgtcctttatcattaaaatatttaaaagtattgatactttatttctgacttgtacaatagtgactatagtttgagtagaacacagactgtcttgaaacagttataacagacaaaattaataaaatggaaatacttttggagtaa

SEQ ID NO: 801 - DNA, 1711 bp, Homo Sapiens
accatcatgttaccatattcttgccaaaaaaaaaaaaaaaaaacaccagagtcgttacatgaagtatctttgatcactgaatttccagcacttctttgttgtgtctagatgctaagcccttttctaatttgaaaaaaaaaaaacaaaaaactggagacctgattctgtttatctcttgtagtttctcttatctctgtttctaaccactctatgtagtgcctctttttttctgtctacacacacacggagcatccaccataccaataatcacagtatgtggtaatgaaaagtggaagggaaaaatggcccttgcttctcacagacaaactcactatctcaatggatcatttttgtttttttgttttgttttgtttttgagacagtctcactctgttgcgcaggctggagtgcagtagtgcaatcttagctcactacaacctctgcccccgggttcaagcaattctcctgcctcagcctcctgagtagctgggattacggcacctgccaccatgccctgctaatttttgtttttttagtagagatggggtttcaccatgttggccaggctggtctcgaactcctgacctcaagtgatctgcccgcctcggcctcccaaagtgctgaaattacaggcatgagccacagcgccccgcctcaatggatcctgatgagctacgcaaaccattatttttatgtctttatgaatgccaccagaaagtttcattttgttctttctgaaaacaaccatgattataagatgtcttctgaaacacggaagtgagagaacatgttgtacagagaagcatgcatccctctgccctgccaccactgcacctatgctaagcatattatagacagaaggatgtccatctgcctatgtaagctcttgcccgtttattcttgggctctgtccaggctgtgaccctattactcctttgctccttcatttgaggactatgactgtgaactgtatttcttcctctctgcacctatataggctacaggaggaagtaacaaaaatcttcccccacacccagagctaaatattttttgccccaagctgaaagttctctagtgaaaatgcagttcaaggccatagatgcaggagagaagtagatttgttggcttctaaaaggaatatttatacagttttgtctaacagcaccatcctaacagcattctgatttgttttattttccatttttaatacctttgttgatgtgtaatttacatacagtaaactacacacttaatgtatacaatattataagtttttatgtacatgtgtactcgagaaaccatcaccactatcaagataataaacatccatcaccccttggagaaatcacgttgcaatccctctcttgtgcccctacctacattctccgttctaaggaactgctgatcttctttctgtctctgtagattagtttgcattttctagaattttatataaatggagccatataatatgtactctttttttggtctggattctttccatcaacataattatcttgagatttatccattttttgcatgtttcaatagtttatgcctttttattgctcaacagtattccattgtatgtatataccacagactgtttatccatttgcctgtagatggatatttgggttgtttctagttttgttgttgttgttgttgttgttgttaccaataaagctgctgtgaacatttggcaccagtc

SEQ ID NO: 802 - DNA, 6952 bp, Homo Sapiens
ggaggcctccccacgcacgctgtggagaagagagttaaaaaacaattcggttggctgaagcctgtgtcagttttcatgtgacccgccttttggaggcatgacaacacaaaaaaaaggggctgttctcgcgagactctaaagcgacggttaagggacaggggacgagtggagcaagtgggccttaatctgaaaataacttgattgtttaatgacattaagagaaaaagattacgagctttgagaaggaggaagcctgggagtaacgacagttaaggagttagcttgcggaaccaacataagaatttataacagggaggtgtcgtttgggatcagacgcgtggcctgcattgccgtagccaccgtggtgtaatgttgccacgtaaaaaccacaaatcccagaattcagtcgggtgatacactggctcagaatgtgattggctgcgggaactagtagcttcctcattggctcccgtggaaggagtgaatgctgggatttgcagtctgatgggggagccgtgctgggtaaaaaccttagaatcgtcgcgcactccgtttctgccgcggattcttatattctccaatacaggctttttctgttatgcagtatttgcagagcaggctgctgcagtttggccaggcgcattgcggatcagttggtgttcttgccagaggcctagcagcagcttcctagcgctactacttgcacctcccaaggcagctgagcctccccacttctctggccagacacactcctaccgtgcatcgtagaaccacctctctgacgccagcaggaccttagtaagagtaatgggtatgcgacagatggctgtagtcaggccctactgatttcaaaatagctaaaagactatctctgtagttagcttttgtggccttgatggacctgcagctgtgtattgctccctcagacgtacaaattcgtggagatgagttatgaaagtatttagtatccaagtttttcatctgcttaatatttgggattttaaacacaagttttgccagctaggggtcaacatccctgaaagtgttagggatggagctagctgacaggcctttctaaaagaacagagagcctggtgaagagatgaaaaatcaatctcacttgatactcctgttaaaaacaacaacaaacctttaaatagctctctactaacacataactcaaatccgatcaaatctacctgacctttaccattgttttctgtattcatcaactattactgagtacttcaaagtcaggcaataggagttaataaaacagatgaaacttggtttagcctcataatatgtgtttaaatttcacacatacctctgatctgctctcatgtatccttctacttgaatgtatgtaatataaaggccgggtgcggtggctcatgcctgtaaccccaccactttgggaggccgaggcgggcagatcagggcatcaggagttcgagaccagcctggccaatatggtgaaaccccatctctactaaaaatacaaaaattagctgggcatggtggcgcgcctgtagtcacagctactcgggaggctgacgtagaaaaattgcttgaacccaggaggcggaggttgcagtgagccgagatcgtgccactgcactccagcctgggcgacagagtgagacaacgtcttaaaatgataataataatatatacgtaatatatgatattttttctccccagtaatgccatatttcattttaccaatctgccatgattaatatatctttcatcaaactgtccttagtgcttcagccacaattaattgccttttgctctgaatagcctttccaccatatttaatgtaaaacacacacacacacacacacacacaaagaagcaggtctttttttgtatgtgtggacctcaaggcctcagtcatttggtattatcaataatactttcttttagcctgtgtccactcagaaagcaaatcatggtttgtctttttctgtgtgtaaattctttcacttttgaatttccagctgaactataatatttggagtcagattccttaaatataaatcatgtttacagccacttacttggtgtcataggcaattcattttcatctttctcaacttcagtttcttcgtgggtaaatgatgatcaggatattacctcaggttgttttaagagttaaataactcctaacctcaggtgatccactggcctcagcctcccaaagtgctgggactacaggcatgagccaccacgcccggcccagccaaatatggtgaaaccctttctctactaaaaatacaaaaattagctgggcagatgataaggagaaaataatgaatgtcaaaggaaacgtaattcctccagtgctggttgtctcaactgcgattgttgtggtttggaaatgtatcaacacccaagaaggctctctcttgtggatgtatcacttaaaacacccagaagttgttgacggcggcgggcagaagggccggtggtttccaagctgcttcaacaatgggacccacaatcctcaagcagaggaagaagaagacatagacaaagaaaaagagaaagaaaaaagaaaagaagatgacaaaaaaagagcttcggctatggaactggtttaatccatacgatcgcccagaggtgctgacggtgaccagctggaatgagccggttgtgtgggaaggcacttagaacagaaccatcctagaaaattattatgccaaacagaaaattactgtgggttgacggtttttgctgtcggaagacatgtagagtattacttgaaggagttcatagcatctgctgataggtacttcatggtaagccacaaagtcatgttttacatcatggccgataatccaggatgctgttgatagagctgggtcctctgcgtttcttcagagtgtttgagatcaagcccgagaagaggtagcaggtcatcagcatcgtgggcatgaagaccaacagggagcacatgttggcccacatccaacaggaagttgacttcctcttctgcatggatgtggaccaagtgttccaagacaattttggagtggagaccctgggccagtccgtggctcagctataggcctggtggtactggacacatcctgaggagaatacttaggagaggcagaaggagtcggtggcatacattccatttggccagggggatttttattaccacgcagccatttttggtggaacacccattcactttctcaacatcacccaggagtgctttaagggaatcctccaggacaggaaaaatgacctcgaagccaagtggcatgataaagccacctaaacaagtatttcttcctcaacataccctctaagatcttatcaccagaatgctgctgggattatcattataggtcatcatgcagatattaaaattgtcaagctatcttggcagcaaaaagaatatacgttggttagaaatgatgactgacttcaaattgtgccaacagttttttgaatttgagagaattattattctggctacttcctcagaaaacaattttaactttaagaaaatattaatgaaacaccaacattgcaatcacatactatctctccttgtaactttgagcattgtaatatgagagaatgaatctatggtaatcaggtgtaaattcccagtgatttcttatgtattctgaatttgggggaaatactatcagctgaaccagaaagaacttgtcataggcaaagataaagccagaaacaggccaggcacggcggcttatgcctgtaatcccagtactttgggaggccaagggagtggatcacctgaggtcaggagttcgagaccagcttggccaacatggtgaaatcccgtctctactaaaaatacaaaaaattagccgggcatggtggcgcacacctgtaatcccacctactcaggaggctgaggcgggagaatcacttgaacctgggaggcagaggttgcattgagccagattgtaccattgtactccagcctgggcagcaagagtgaaattccatctaaaaacaaacaaacaaaactctacatgtgtcagataacatcctggagaaaatcaggtggtaagggaagtgttggcagcgagatatggttgtagggggttatacccttgattccaatgttttcctgtttccgatggatctaaagaacatggagtttttatttgcagcaggggaactttcagtaaggacaccgtttgccttggcaatcctcaaaatacttcaagaacagattgtttcagaccatctgtagtccattcttttctcatcaggatgtcatttggtttctgtgtgaaagtttggtggagattcccagtagatattatgatggtgcatggtcagagtcccagggaacctgaatgaaccaaggtgctcaatgtgaagtgaaaacagcctcaacatgagtgccatgaaatagcaaagagagagtgcaagagaggggctgatcgctgtggggcagtgccaccttgcaggaacacatgccatgaggttggtgcttaaatacatcatggatccaggcactgaatgggaggcagtatgggtgatttccagcttggttgaccccatgactgacaaacagcagggacttgaatggaagatgcttcttgttttgcccaagttgtattcggtctaccagattctgcaacttatgtcttcagatccttggtgaggagatatggatgctgtcagagaaggcaaatgcctgcagtggatcgaagaggttttcaaggagttccatttccagaatgtggcttcatcagaggacaatggatcatcagctagtcccaccacttagctattctggaactcagggttcctgtgccactcataccccaacttggagggctgacatcaaagagtaaactgaagaaatcaagtaacctctcatttttcatctgcactatggaagtgtaacaactagacgtgtaaccagcaaaagggttcggccatttgtttatagaaaggagtcaaaataataatgacatgtgaaagaaagagagcaagactttactacttgtgttagcaaggggaagaatgggtgaaattttaaaaaatttccactcttccctttgtggagggaagatagagatttttaaggagagaggggtttggaatgtaggagaggaagtgggtatgaggtggcacggtttgttttaatgacttattgtgaattgttgttttatttggtgaaggccctggtgtcattttgggctttaattaggttacaaattaattgcagtcaattttatggtcaatttttgttttttcttggagatggggtctcactctgtctcccaggctggagtgcagtggtgtgatcttggctcaatgcagtcttgacctcccaggctcaggtgatcctctcctacctcagcctccctagtagctaggaccacaggcatgcaccatccagcacagctaactttttgtatttttttttggtggagatggggtttcaccatgttgcccagactagtctcaaatttctgggctcaagcagtcctcccacctcggcctcacgaagtgctgggataacaggtgtgagcctttgcatctggcctgtagtcagtttttagctgggattgagtttcagccttgactggggagagaattttggaggtgtctggtttgtgttaggatttggcctttgacgttttaatggaaatatatgactagatatgtcagtgtggcatgtacttaacaaggatgtaagtaaataaatatgcataacgcatgggagtatagtatgggaaagaaggggagtggcgatttatagtacattttgaggctgtattttaaggcaaaaggaagcagatatatagtttgtctaaagttatattttgagattgggagaagggaggaaagaaaacattttgaggttgtaaaatacatttgtagtttattttcaagttatattttgaggctggggagaaagttggaaaggaaaaaaagttttaaaatgcagtttgaagttaagctgtttggttgtaatttttattgtcaaattttattttatttgtatggaaaatggctgccataattgttttggctatttttttgttgagaaggggcatagtttgggggtattagaatggaattgatttatttggatttggaaatatttatgagtatttgggcctatagacaatatttattggagtgttatagtttgaggtttagaaagttttggggaaagtctgtcttacagttttacatagagggtataatagtagtaagttttataacacagggatatatctacccctgtaggccaggccaatgttataagtagtttttgtctctaacatggtcctgacttgaattagaatgtcccctattgatttagtgacaatgtagggtcgcacatagatttaattttttggtgtatattttgtagggctatttgaggcatttttgaattttttaattatgtagggtttttattgttaattgtaattggatgtgatgacacgttggctaatatatatatttaataggctgtaaatagggatatgaatatttatgaaggtggctttaagtcttgtttagtttatgagggtggattagtttagttagttgttttatttagaaggtagtattgtacatgggctaggcctttttatgtgatgaaggcagaaaaaagtttattaagaggcatttttatggaaatagaaaagcaaatattaatgttggaaactatttggatgttaaagtacttttagttatagaggaggaaggcagtagtaatttgacgttttctttgtctgtgttataaggaataagctttagtttgtaaagcctcaggaaagaggtagtagtaattttattgagtttaagttagaaaaataaaagaaaaaaattgaaaatattagtttggaaatttgtactctagaaagaatttaggatttagttaaaattatagaaaataataaaaactcaaaaacagtggataaga

SEQ ID NO: 803 - DNA, 18269 bp, Homo Sapiens
agggcggaagccacgggacgtggagcagatggtgaggatagtggggaggtagcagcagaggatgacccgaggcaaaagtgcaagtgaagaaaagtcgccttgccgggcagaggaaattactccaggatttgaatcatcacaagagattcaccagaggattttatacacttgggctgtggcagcagactaattacatcacagcactaggcttgcgtgaggagccatgcagcactcttaccacagacacttggagcaccactggatagacagactggaatgacactgcctcgacccactgtagagccttctcttgcttcaggcaccattcagaagtagcagccttacaagttacttggtgtaaccggatcagagcagagcatccacttgtggtttgtgttgcctacaaaatctaaagaggccgaggactggcacaataatcctgaacttggaaaacaaagactgcataacattacctattgatatagcggccagatgtgactttggttgttttcccttcatatgtggttgtatacaaaatagtacattttgttaagtaggaacttttttggacttgtattatggtaagaaacatgtatgtgtgtcctcctgtaggctgtctgaatatttctttctggtctacatagcatctcttggtctgggcaaacttcccttcccaatttaggtggttctgatgagtaaaggtaaattaccagatagcaaagcaagagggcattctagaaaataagatcagtggaagcaaaggcctatgggcattgtgggttctggaagcagtaattagttcagttgagtagtaagtagcactaggggtgaagagtatgaagagtggagtggtgggagataaaacgggaaatgttaggtagggctatactggaaggagctttatgtaccatatgaagaaagtggacaaaatcctatgctgagggaaaagtagtgattttttttttacaggactgtgatgtgatcacatcacattgatatgaaagatattccatgagggagaatttgagatgagcaatactaggggtagagctattatttaagattacctagtaattctgaataaaatgatgagacatgagctaagtaaggtagtgtgaattagaggagaaaatgaatttaaatgatacataggaagtggaattgacagacttggtggctgactatgtggagtgggaagagagaacaggaatttatgtatgtggttaaaaattatatacttgtatgaaacaatctggtttgagcttgagtggggttcagagagatctgggcctagtgtagagtgaccagctgttctggtttatccaagattaagggatttcgatttcctgggatgtgagacttccaatgctaaaactgtgaaagtccccagcaaaccaggacaaattggtcatgctagcctaatatgaatgggcggacagattagtgacaggagcttatcggcataagcactgaaacaccttctgggataaccatgacctggcaagagagcctttagtggtgcaaagaaatggtgatccttgataatgcatggtagttgctattcaaatctacctcccaatggatccaatctggggtcccacggagaaaggaggctggaagtaaaatacgaaagaactgtttcactaatctgtgaccccgtttaacagagtgtaactcagagaggacagattctttctcaccgtggactaccccacagctctggaaacctgagggctttagtacattgggagattcagttaaatacaggttgggggagttccaagggatggagagggtggggaaagggagaaggaggaactggtaacctgtactggtacaagaaaaactaaaatacttagcagaacagaataacatctgtgcagtggggtataagtcagtgaaatatgagttattacagcacaggtgacatcagcaggcttttcttgaagcaattcctttcagaaggaaagaatgtgttgattactttctttgttatgttgcgccatctactggtaactctcatgtacttttttcctagttagatgtttaaaagaagacagatgaattaaaaacttgagaactgtttccaaagtcgtcatttattcgttcgttcgttcattcattcattcattcattcacttcacaaatactgagtgagtatgtataccttctatattgcagttacatttctaggcattggggttacagctgtgaacaaaactgaaagaaccctgaactcatggaagcttactttgatgaaagagtacatttcatttttttcccatgtgaatgttctgttttcaaagcaccatttactgaaaagattatttttttttctttaggactctgcagtgccgttactgttatatatgaagtgtccatttatatgtgagtcattgcctatcttggttatgctccattgatttatttgtcaatttctgtgacaatatcatattgtctttatcattttactttataatcattgttaatatttagtacatcaagaactcccacctcattttttaaaagaatgttttggatagtcttggcctttaaattttccataaagtttaaaatcagtctgtcaaattctgtcaaaaaaaaaaaaaccctcctgggaatatttattgggattgaactgaatcattaaatcattttagagtgaactgatatttttatactattgagccttccaatcacgatttacttcagttttccttagtgtctttcaatagacataaaagtcttatatatcttttggtacacttatttgtagatacttgatttttttaggctaaaaaggcatctttaaaaaatcatttgctaacaattatggctggtgtttggaaatgtaactacttttgtcatattgattattcatctagggattttgctaaatgctcttataattcaaataaatctctttttcctacatatacaatttatcatttgtagataattataccattaatttgtttttcttatccttcatgtactagttagaagctctagtacaacacagaatagaaatggtgatattaggcaccctttaattgttcctgactttacaggaaaagcttttgacataaaacattacttttctttggttttctacagatactttttattagattaagaactttcattctatttcttttttcttaagtgtttaaaaatcttgaatggatattaagttttatcaaatgctttagaaattttgcatctatgtagaaatactgtaactttttttctgcttgaatctcttaatgtggtgaagaactggtaccaattctactgaaactattcaaaaaatttgaggaggaaggactcctctccaactcattctataaagccagcatcaccctgataccaaaatctggcaaagacataatgataaaagaaagctacaggccaatatctctgatgaatgtatgtgcaaaaatcctcaacaaaatactagcaaactgaatccgaagcacattaaaaagttaattcatcatgatcaagttggtttcattcctgggatgcaaggttggttcaacatacacaaatcaataaatgtgattcaccacataaacagaattaaaaacaaaaaccatatgatcatctcaatagacacagaaaaagctttttataaaattcaacatcccatcatgataaaagccctctaaaaaatagtcaccaaaggaacatacctcaaaataagagccatctatgataaaccagctaacatcatactgaaggggcaaaaattggaagcattcccctggagaattggaacaagacaagaatgcccactctcaccactcctattcaacatggtaatgaaagtccttgacacagcaatcaggtgaaagaaagaaataaaagacatccaaataggaaaagaagaagatagtttgacttcttctttgctgatgataggaatctatacatagaaaaccctaaaaactgccaaaagtctcctagaactgataaacaacttcagcaaaatttccagatacaaaatcaatatacaaaaatcagtaacatttctatacaccaataacattcaagctgagagccaaaccaagaatgcaatcccatttacaatagctgcaaaaaacaaacaaacaaaaacctaggaatacaagtaatgatggaggtgaaagatctctccacgaactacaaaatactgctgaaaaaaaccatacgtggtacaaacaaatggaaaaacagtccatgctcatggattagaagaatcaatattgttaaaatggctaaaagcaatctacagattgaatgctattcttatcaagctaccaacattattttccacagaagtagaaaaaactattctaaaattcatatggaaccaaaaaagagtacagatagccaaagcaatcctaagcaaaaagaacaaagctggaggcatcacattagcaacttcaaactatactacaaggctacagtatcaaaacaacatggtactgggacaaaaacagatgcacagaccaatggaacagaatagagaacccagaagtaaagccacacatctacaaccacctgatctttaacaaagtcatcaaaaataaacaatggggaaaggactctctattcaataaatggtgctgggataactggctagccatatgcagaagactgaaactggacccctacctttcaccaaatacaaaagttaactcaagatgaattaaatatttaaatgtaagacctcaaactataagaatcatagaagaaaacctaagaaacctattctggacatcagccttgggaaataattcataactgagtcctcaaaagcaattgcaacggaaacaaattgaccagtggtacctaattaaagtaacaagcttccaattaaagctaccaattaaagtaactatcaacagagtaaacagcctacagaataggagaaaatgtttgcaaactatgcatctgacaaaagtctgatatctagagctataaggaacctaaacaaatcagcaagcaaaaaaccaataaccccatttaaaaaatgagcaaaagacatgaacagacacttcccaaaagaagacctgcaagtgggcaacaaatacatgaaaaaatgctccacatcgctaattgtcagagaaatgcaaatcaaaaccataatgagataccatctcatatcagttagaatggctattattattattattttatttttattatattttagatggaatctcgctctgttgccaggctggagtgcagtggcacaacctcagctcactgcaacctctgcctcctgggttcaagtgattctcctgcctcagccaccatgcccacctaatttttgtatttttagtagagatggggtttcaccatgttggccaggatgtctccatctcttgacctcgtgatccacacgcctcagcctctcgaagtgctgggattacagttgtgagccactgcgccgggctggctattattaaaaaataaaaataaatagatgctggtaagcctgcagagaaaagggaaacttatacacttttggtgggaatgtaaattagttcagctactgtggaaagctgttttttgagttgtgtgagttctttacatattctacatacctaactcatcaggtaaattatttgcaaaagttttctcccattttatgggttgtctttccactttgttgttagtattctttgatacactaaagttttgtattttgatgaattctaatttatttttttcttttgattgtgcttttggtgtcatatctaagaaaccattcccagctgtgcatggtagtgtgcgcctgttgtcccagttacttgggaggctgaggcgggaggatcccttgagcccaggagtttgaggttttaatactgtactgtagtgaaacagtgtattatagtgaaacagcatagtgaaactttgtctctaaaaaaaaaaaattctttttaaagaaataaatctttgctaaatccaagataatcatttattcctatattttcttctaagagtttcatagttttagctcttatgtttagattttttatccattgtgagttaacttttgtaaatggtctgaggtaagggcctagcgttattttgtgggacagttttcttcttgtgtcatttgtaattttatatttttctaaaataatttctatttcatccatatattcaaatttattaaagttgcttataatatgctttgttagcttttaaatatctgtattattggtaagagtagctccccctttttatatgatactgttacttgtgctttctttttttcttgtctaattttgccagtggtttgtcaattttattagtctttttaaatagaaaccactactagcaaagaaatagaacattgtcagtctttcttcttttctgagcactgatgatgctctagaccttggcctagatagttgggttttatttgtttgtttgagacagggtttcactttatcgcccaggctagagtgcagtgagtgcacaatattacctcactgtagtcttgacctcctgggctcaagtgattctcccacctcagcctcctgagtagctgggactacagatgtgcaccaccactctcagctaatttttacatttttttgtagaaacaaggtcccactatgttacccaggctggtctcaaacttctggactcaaatgatcctcctgcctcagcctcccaaagtgctggaattacaggtgtgagccactattcccagccataactcgtttttgctacatattactcaactacatattactcaactaatgtttttgctaaacattactcattcattcaatacatattttgagcacctactatgtattgaggatacatcagtgaacagacaggaaattctgttctcatgaagcttacattctggtcggggagatagataataaataaaataagtaaattacataatattttagtaccttagaagggattaagggctgtgaagaaaaataactggagaaatggataaggagggaacagactactggaatttttaaaaaaatggtagacatgtaagacctcattgagggtacatattttttaaaaattagtttgaaataattatgtgtttatgggaagttacaaagatgattcagagagttctattagccttcactagttacccctaatagttgcattcttgtgtaactatagtacagtataaaaaccaagaaagtagcattagtataatgtgtgcttatagtagtatgccattttatcacacatatagattcttgtaccaataccacagtcaagatactgaactaggctggtagcagtggctcacacttgtaatcccagcactttgggaggctgagacgggtgggatcacttgaggccaggagttcaagaccagcctggccaacatggtaaaaccccgtctctactaaaaatacaaaaattagccaggtgtggtggtgtgcgcctgtagttgcagctagttgggaggctgaggcatgagaattgcttgaacccgggaggcggaggttgtagtgagccaagatcgtgccactgcactccagcctgggtgacggagccacactctgttaaaaaaaaaaagatgcagaactattctgtcctcacaaagatattccttatgctatgttataacacaaagatgtctttatagttcaccttactcccctcacttctaccatcactaacccctggcaaccattcatctgttctccacctctctaattttgtcatttcaaaagcattatatagatggaatcatacagtatataaccttttgaaacgatatttttttcactcagcacaatgcctttttggtctatctgagttcctttctttgtgtattccatgatgttagtataccacagtttgtttaaccattcacccattgaaggacattttggttgttttcagtttctggctattacaaataaagctgccatgagcattggtgtgcagggttttatgtagatataagatttctttaggataaatactaaaagtgcaattcttgggttgcatggttgtatatatttagttttttaagaaactgccaaaatacttttcagagtggttataccattttatcagtaatggtgggatgagaaacgttgtttctctgcatcttgccagaacatggtattgttataattttttattaatattttagctcttctaatagcacctggctaatctgaatttatatcagaaatgaaagcttaattttgattaataaaaccaatcgatataattcactttattaagaaatactggaaaaagttatttgatcatctccgtggacacacagtttgatgaaatttaccaaatattcatgataaaaattcttagcatactagaataaaagaaaatttcctgccaactaggtcaggacaaaaatgaaaaaaaaaaaaaaaaagaaaaaagaaaatttccttggtacaatgaaaggtatgtacaatgtaatacctagagcaaccacttaaaaaaatctatatgaagagatacactcgaaaacactatcaataaatcaaaatggaattctgaaaaatgttcaagtaatccacagaaaggcaagaaaagagaaacagaggaaacaaaaaaacaaagggaacaaacagaaaagaaaaaataaaatgtcagacctacgccctaacatatcagtattaataatcagtgagctctggactctcttctttatcccctttgccgctcaaggttttcaaaagcaccactcattctcttaaaggacttttattaaataggcagatgaccccaggggaaaggtcatctcaaatgccgggctaaccctcctgagcctctgtctttctggctcagtaattaccctcctggctaagtaattccaaagagttatggtagatttctgatgtcacaaagaaaatttttaaaaaatacttttttcagctttgttttagggcctcagccttagattgtatttcctagtgcagttttttaaaaaaaaaatcggtgacctctctcatctaatgctttctctgttcttgtagatgctttactttttccctgtcattttgatgagatttggggcaagaccatggaaaaggatgtaaagatggcacaggctcattattccctgagcttctatcctctaagatcctaggctgggaattctacgtaatcttgttagctctgtgatgtcctcaattggtaaaagagttggatcttatttcctagactagagattgacaaattatggcctgtggtctgcctatttttgcatgacccatgagctaataattttttgctttacatttcttaaacttgtttttgaatagttttagatttacaaaaatttgtgaaaatagtagagttcccatatgacccacaccctatttcccctattattaacatcttacattagtatagtacatttgtcacaattaatgagccaatattgatgcatattattgactcaagtctacacttttgatttccttagtttttatctaatgtcctttttctgttccaggctcccaaccaagattcctcactatgtttactaatcaaatctcttgagactcctcttggctttgacaatttctcaaactttccttgtttatgatgactttgacagtttgaggagtgttaataactgcaaagtttcgagggcctacagaatgtctctcagttgggatttgtctgatgtgtttatcaagaacacactaaagttatgggtttttgggtggaagaccacaaagataaattgcctataatagactcatgagactgtcataacaaagtaccacaaattatgtgactttcaaatagcagaaatttattctttctcacagttctggaggccagaagtctaaaagtgttaaccgggttggtttcttctgacagctgtgaggaagaatctattccacacctctctccttagcttctggcgatgactgtcaatttttggtgttccttggcttataaatacatcattctgatttctgcctctgtcttcacctagctatcctctctgtgtgtctgtcaaaatttccctcttcttataaaacacataagtcatattggattaaggcccaccttgatgacctcaccttaactaattgtaactgcaaagactatttgcaaataaggttccattcataaggtttggggtagacaaaacttgagaacagagactcattttcttctaaaatgctttctctgaaagatttttaaaaagaaaagggtggaaatttgaaagaaaaataagtctcaggaccccaaaatcagtaagccaaagggaaaagtcaagctgggaactgtgttaggcaaacttgcctcccattttattcccaaataagatagccacaaagatttaaaaaaaaaaaaaaaagctacacacctccctcacaatttatccacaaggaaatttcttgtgggcctcaagatctttaccctaaaacagttctgttgaatttcaccctggcaaagtaaattggtagcttatcttcacaggtgcaggtcaaagacagaactcaaaagtgatccctctgctcacctgagacaaacgcacacctgattgcttgctctgccctgttgtttatgtaaaaatgtagattcgctaagccagactaaggcataagagattattcctctaccctcctctcacatgtaaattgtgtattcagtgaaaggctaatcaggctcaaaagaattagccttttctctcttatctacctatgacctgaaagtcgtcctccttcctacctgtttgagttgtcatgccttttcagaccgaaccaatgtacatcttgcacgtattgattaatgtctcatgtctccctaaaatgtataaaactaagctgtgccccaactaccttggacacatgtcgacaggacctcctgaggcggtgtcgcaggtgcatccttaatcttgggaaaataaactttctaaattgggggaaaaaaagaacttcagcacatcttttttgggggacacaatttaactcataacagtgccattctcatcacatcgtatgaaggacacgagttatcaacatggcttatcactgttgatgttaaccttaataacttggctatggtagtttttgtcaagtttctccacggtaaagttactctcttcctccctgcttctaaattattctctttggacagaagtcattatgttcagcccacacttactaagccagaaggatgggaaattattctctacctccttgagggcagagtattcacatcaattatttggaattcttttgcaatcattcatttattcatatctgtgtggactcatggatgtttgttttatattttgggttagaattcagttctacattatttattttgttgctcaaattgttccattggaagctcttttagttggcttctttttgcctttgacatactcttttcattgtgttctttttgggcacttccttgcttctgggactagaatatactccaggatcatcttgggatcatcggcatgggtagggaaaatgtacagaaatggtatgagaatgtgtcccctttttgtacatattccatacccatcctctggaatcagccatttcttcaaggagctctgattccttttattggagaatggtattaaaaaccaaaattttggttctaggtctatttgttgctactggagtgtcattgtttctaagccccactcagctgacagaacaaggaaatatatgtttctactaacctgtgtatacacacatatgtttataaacatttctacatgtattcatttgtatcgatattaagctaaacatgagttcatattgatgtctccaactctcatgcattaccacatggatcattccggccccctcctctggtttgtctgtaatctcacattccaacagtaagaaacatggcccccaccatccaccatccatttacttaactgttcaattccagtatgtccatgtatggtggtttcagaattattaacctgtacccccatggaaacaacaatttgaccaactagagtccagcacttatgtacagttcctttttagtcttacagtctccactcatttccaaagttaggtcaggatgttttcctcacaaactcttcagtgagatcatttcatgcatttgtaatacatttagattattttttgtcacactctatattctgtcctgtgatctccttaccccctatatgatttttcaaaaatttgcatacattaagatgtggttggtgctgtaaagttctatgggctttgacataagcatagtgacatgtatcaaccattacagaatcatacagaatagtttcactatcctgaaaaatcccatgggcttcacttatttagccctcccttccccaaggtcctggcaatcactgatctgtttaccatctctatagttttgccttttccaaaatgtcatgtaaattgaatcatacataatctgtgatagtcaattttatgtataaacttgaatgagttaagggatgcccaggtagctgctaaaacattatttctgtctatgaaggtgtttgtggaagagattagcatttgggtcagtgagactgagtaaagaagatctgctctcaccaatgtgagtgggcatcatccaatttattgagtgtctgagtagatccaaagggtagggagagggtgaatttgctccctctttcagctgggccatccatcttctcctgccctcagacgttggccctccaggtgctcaggacttagtgtttgaactgaattacaccaccagctttcttggttctccagcttgcagatggcagagtgtgggacttctcagactcaacagtgtgagccaattcctataataaattttctctttctttctgtgttatcactacacacacacacacacacacacacgctacagtcattctcagtatccatgagggatttgtttggggacccctgtagataccaacatctgtggatattcaagttccttatataaaatggcatagtatttgcatgtaacctacacacaacctgctgtatactttaaatcatctctaggttacttataatacctaacacaactacataaatagttgttaggttgtatgctttaggaaataatgaccggaagaaaaagtctacttattcaggataatttttttttctgagtattcttgacccttggcaggttgaatctgcagatttggaacctggggatatggaaggctgactgtatatatgtgtctccatcctattgactctgtttcattggggcaccctgactaatacagtgcatagttcctcacctacttttgaagctgtggttgcaatggcaatataggtttcagagcctatacagagctattcgagtcttctttgttcactttgttcactgaagctcccacttgattctgctgatgcttcctgcaggggtgagtgcactttctcaggcctggttccactaggtgaagtgtgggagatgccaggccatgggtcagtgagtgcttccctgaacctgacctctgggctggctagtgccagtggggctcttgtttgatccctgctggtgttacctgagggcgtggaaggtgctttcctgccctccttagtgccagcttatgggtggaggatgctggggctatggatagacaataattctcagggcctgctcatcaggtcacttggtgctgatgagcttccttactgcatctctgctactgctgctgaggtgggaaacatctacctgggtgccttctgccaccgatgttggagggagagtgtcaggaaacagtgggcttgggttactctgggtcaggaatcagcatggcttggctagatcttctgcttctgtgtttctcacgaagctgtaatcaagatgttggctgccagtaaggtctcatctgaatattcaacgggagaaagatctactttcaagtgccctgatgtggttgtcagatgtattcaattccttaagggttcttggactaagagcctcagttcctttctggctgttggctagaggctgctctcagttacttgctgaaggagtccaacatggcaacttgctgcacccaaagcagcaagcaagcaagtccagtagcaagacagaagtcacaatcttatgtaacctaaccatgaaaatgacatctcattacctctgtcatattcttttggttgaaagcaagtcactacattcagctcacactcaaggttagggcgtgggggaagtagattacataaggacatgaataccagaagtggatcattaaggaccatagtagagtctgtctgccacagtcatcatcaatattccttacaattttagggttttaatggccaataattcttatcattgtagaatacttagtaaacctcagttttttcaattttttctctcattaaaggggattaaaatataactgtgactttagaacctccagttcttataacatttctttctttccctttctttttctttctttctttctctctctctccctttctttctttctttctttctttctttctttctttctttctttctttctttctttctttctttctttctctccccctccctccctcctctgtctctccctctatctatctatctatctatctatctatctatctatctctctctctctctctctctctctctctctctctctctttctcccctttctctcctttctctctctgtcacccaggctggaatgcattggcataatctcggctcactgcaacctccatctcccaggttcaagttattctcctgcctcagcctcctgaagtagctgggactacaggcgcacaccaccacactgggctaatttttgtatttttagtagagaagggatttcaccatgttggtcaggttggtctcgaactcctgatctcaagtgatctgcccaccttagcctcccaaagtgctgcgattacaggcacgagctttttttctttttttgagacagggtctccctctgtcacccaggctggagtgcaatagcatgatcacagcacactgcagcctcaatctcctgggcttaagcaatccttccacttcagcctcctgaatagcaaggactacaggtgcatgccaccacacctagctactttttttgtttgttttttgtagagatggggatctcactatgttgccccagcttgtctccaactcctgggctcaagtgatcctcccatctcagcctcccaaagtgctgggattacaggcacgagccaccatgcctaaccttcttataactatgctatgatgcctcactaaatttatgaaaacataattagtatgattacatattcttatagaggcaagttcttcctttcctgagccatcatagcattttagttatgtcttccttgtgattttgagcacttttaaacttgcaaaaggaatatttgtgaatagtcttctctcccttgctagactgtagggtctttgaggataaattattattattacttgagacagggtctcactctgtcactcaggctggagtgcagtggcttgaataaggcttactgcagccttgacctcctgggctcaagcagttatcttacctcagcctcctgagtagctgggaccacaagtgcatgccaccatgaccagctaattgttgtatattttgtagagatggggtatcaccatgttgcccaggctggtctccaactcctgggctcaggtgatctgcccacctcagcctcccaaagtactaggattgcaggcgtgagccatcacactcggtctgacaaattatggtttttaacattttttacacctgactgcacccaaaagagtacatttactatggagttcagtaaatatctattttaaaaaaaaagtcccatagcatttttaaaaatatgaactcaacatctctttgtatcaataaaagtgagatatagatttgatttatgtatctctagttcacctaagttcactcagatagtagacagactgaatactaattgaggagattaatcacaagcagttcatatccaaacactgaaaaatgtagtaaatatctgatgaatgagttgatgaatattcatttttctccatatatatatatatatatatatccctttgacatagtctctgtgcatgtttttgtgcatgaatgtatgtgtatgtgtttgtgtatatatagacacatgtatatatacacacatacgtatatatacatatatgtttatatatgtatatatgtgttttatatatacatgtgtatgtgtatacatatatatgcacacgtatatactcatatgtatatacacacacatatatatgtttctgagctagagtctgggtatgtttcttcataagaaaattttatgcctccaaagtatttccacattatttataataatatataataacatcacattgtgtaagtaataacattagtttatcatccatttattctttatccagcataggtagaattagatgattcaaaattgcaaagagaaacataatttattttggaagattgtacatttttgtaagtttctaaaaagctaaaaactttcatgaattttgtacttgagaaattactgtgattcctttgttaattcataaacctaatggtataaccatcacctttctgactgccatgctatcttaacatttttaatttggggaggggttctaaactttgtatcccaattatattctggtgataacagcttagtaggtttattgacaaaaaaatatttgtttaggtagctttcatataggctgttaagtttatttgtggtgtcctgaacagttcctttctgctattctttttttttaaattttattattattatactttaagttttagggtacatgtgcacaatgtgcaggttagttacatatgtatacatgtgccatgctggtgtgctgcatccattaactcgtcatttagcattaggtatatctcctaatgctatccctccccactccccccaccccacaacagtccccagagtgtgatgttccccttcctgtgttcatgtgttctcattgttcaattcccacctatgagtaagaacatgcggtgtttggttttttgtccttgcgatagtttactgagaatgatgatttccaatttcatccatgtccctacaaaggacatgaactcatcatttcttatggctgcatagtattccttggtgtatatgtgccacattttcttaatctggtctgtcattgttagacatttgggttggttccaagtctttgctattgtgaatagtgccgcaataaacatacgagtgcatgtgtctttatagcagcatgatttatagtactttgggtatatacccagtaatgggatggctgggtcaaatggtatttctagttctagatccctgaggaatcgccacactggcttccacaatggttgaaccagtttacagtcccaccaacagtgtaaaagtgttcctatttctccacatcttcccagcacccgttgtttcctgacttttttaatgattgccattctaaccggtgtgagatggtatctcattgtggttttgatttgcatttctctgatggccagtgatggtgagcattttttcatgtgttttttggctgcataaatgtcttcttttgtgaagtgtctgttcatgtcctttgcccactttttgatggggttgtttgtttttttcttgtaaatttgtttgagttcattgtagattctggatattagccgtttgtcagatgagtaggttgcgaaaattttctcccattttgtaggttgcctgttcactctgatggtagtttcttttgctgtgcagaagctctttagtttaattagatcccatttgtcaattttggcttttgttgccattgcttttggtgttttagacatgaagtccttgcccatgcctatgtcctgaatggtaatgcctaggttttctgctaggctttttatggttttaggtctaacgtttaagtctttaatccatcttgaattaatttttgtataaggtgtaaggaatggatccagtttcagctttctacatatggctagccagttttcccagcaccatttattaaatagggaatcctttccccattgcttgtttttctcaggtttgtcaaagatgtcagatagttgtaaatatgcggcgttatttctgagggctctgttctgttccattgatctatatctctgttttggtaccagtaccatgctgttttggttactgtagccttgtagtatagtttgaagtcgggtagtgtgatgcctccagctttgttcttttggcttaggattgacttggtgatgcgggctcttttttggttccata

SEQ ID NO: 804 - DNA, 7664 bp, Homo Sapiens
gaaagagcgtagattcaaatataaacttacctaatgatacgctcaaactgttccttccattttgggaccagggaacagagctcacttaatgctgctctcccactgatgatgcccacccattctcggcctgcaagccctaccactcacagcttcaaaaatggctccgcccttcctgattccaccccacacagaagaaagcaacttcttgtgatgcttccttattctggatgtggctcacctcttaccccttccaactcctttgggtcccctagaaagcctccctggctaaggggtacaggccctctcctcagcagtgggcactgaccgtctaaccagggctctgtctcggcacctggtagcaaggacggcaagatacaacaacatgctgattttaatagcctctggctttctccactgcgtttctcacctgaatgccctgcacaccaaatcttccatggggtcacccttgacctctagggcaattcccaagaatctagcagaggagtgggggaaaccaaaaggctgacatgaaggactcaagggaagcctctggaaagaagagaccagacactaaaagggatgtgtgtgaaatactggtttttattggttggcacaagattacaacctacaatttcaatgcccttccctcccacacagctcaaatggaaggaaactgattaacacatagaaaggaacggcaggctcacaggtttaagcatttgtttttacaaaaaggagtgggatatgggggtggtcaagttttacgggtaataacaacattctctctagatggcagggggtaagtctgcctgtcctccattgctggtaccacataagggatacattagtaaagtagggaaagggttatatgtgtggctggcctgttctttagagaggaaggtgggatggtatctgctgtgtacctgtctcagaccaaacctggggctggaccagtgcccctttcttctcagccctcctccacagcctgactgtactgccagccgcacccatgagaaggaggtgtgaaggaagcctgaggacatccacctcgagaaaaggaaacaggaaaactatttccttccgccttctctggaccaaatttcactcccctcagctccagagagtgctgcaaaaatcttccttagggacgctgtgaagacacggggaagaggccagccctgagcgggcaagaagaaaagcttgaactttccatgcagtaccaagcaaggctattttggaaacaagcaaacaaacaaaaaatggaaaccaacaccatataaccacaggttgggtagctcctaaatcctggacagcatttggattgggggtaagggcaattttactccagctccttgttttataacccgcacaaggtgccaagaggtttaaggaccacaactgacctctctttccctacaagcaccattccttggattcccagttttgttgagctcatttgaggtcatccttgccatcctcttaaaaaatgacacagcctcttggttattccattttctatccctttctacaattatgaacacactctctaaacaggagatctatatatgctctcatcctgcaacccaagagattaggtgacctaatgatgagaaggctaacttatttgctttcctgggtggtcctgatggaaatgaacagcagcagagttctggtgggatagagcagtctagtctgagccactgtgtgattccccaggggactggtccctgggtacatgggtccctggctctctgtctcagttccacagatattactcaacttggccatttacgcctcagctaaaacatatgagcatgagggaaaagggacaagaaatacttttgtcctctagaaaaacttaactcaatacatcttggctactttgcctcaacccacggggttccctggaaacatttgttgaacttggccaagaggagattgtatatggatggcacacctggaaaaggggagaaagcacactagttcatctcttttataagtagaatggtcccagggatgttaacctttctgatgctgatagtagatgagtggagtggaggtaatcgtgagaaaacttaaaaacccttaagctgtttggagactacacaccacagtggagcaaaccaaggtggggcctcactgcctcctcagagcccatccctgaccatgtcattggataggatggaagacaaagtctttgaaatggaggctgggctggcaaaagtaagtatgaagatgctactactggccttccacttcctctctctgatacacctaagaaggtgagagacactagcttcaattccattttacaacagttctcaacaacctgaaatattcttgacttccttaagcacatggaaaactggtaagctatatctttctaactgaaattttacttattctaaccaccaaccttttctttgattatcaaccagtttgacagtcttcagatcacaaaacaatagaacagacctgacatttacaaaactgtactacatacttatttcttttacagtagagctgaccaattacttttctaactactaatgcaacaccatgccactgggccctggactctgatgtttctgatccctgagcaacacatctatgtccattcacagatggaaatgaaagagtgagattctcagaggctaaacaacattctgggagcaaattggatttttgaagggagagtcctcttagaaaattctgagcaaacatgctcccagtcacgagggatggggtgagcgggcaggtttctgtctgtgagctatagctcccttctgaactccctcatgttcttgggaggacacaagcctcttgctcattaagcaaaggccctccaagtctcctttttacttcagcactttggaaactctccaagacttaacttccgatctggggaggttctacgtggagcagacctatcccttcttattcctgttcctgggtgtctccataatcagcctctaccttccctggcataagtcatatctgttatgctgcaggaactgagtaaccaaagctagatatcccttggaccactgattagtgacacattttctccacaacaaagggaggttaaagacaaaggtttaacctgagaaactttttttttggcaagataataaagaggttaaagaggctacgtggatctgtcactgctttagcttaccattttcaattcagcaccaaagtgctcagaaagacaggctcagatcaggacgacttcttaaagggattcacaggcaatattactggcaaaatgattttccaaagctgagccacgcgccccaccctacagggaggggagtagaatcttatggcccagcattggcattgaggcatcttgctttttttcctcagaattccacaaaggcttaagagtgatctaaatgcctggctggaagctcaagtctaggagagctattttactgcactgttgagatgttctctgcaaggtagtcacagataataagcaatttagtagataattattctatacaagaattaatgttctctgaaacagtgattaatagaatcttcacatctggcctggctgggaggcttgggggcaggaaagggagggtggaaggatgggtagcacatcaaaatggtgatgaacctggcaaaacgacaatgctgctgtttttgtatcctttaaagcctatatccagggttttaaatgacgctttttttgtgtgcttcctgataggaagtcaaataagttttagtattaagaactggggatataaaccaaaggaaacctagagtcaactgactgctggaggaacagaagcaatgacttctttccaccttctagatagtaatcttacttttgttggctaaaagcactttcttcagcattctgagttaacacgggttccctataagctcccctccccaggtggacagtcttattttctaagacaagctcaaagctcaaactcaccaaattaccactataaacaaagcttcagggaagagacataaccttacttcaaaagcttcaggtcagagacagccaaaatcatgtgactgctagcctcagctcaagtagtgtgcccaaatcatcacaaaatgggattcccttcccttttcttttttttttttttttttttgagacggagtcttgctctgtcgcctaggctgcagtgcagtggcgggatctcggctcactgcaacatccacctcctgggttcaagcgattctcctgcctcagcctcccgagtagctgggactacaggagcgtgccactacacctggctaatttttgtatttttagtagagatggggtttcaccatattggtcaggctggtcttgaactcctgaccttgtgatccacccgcctcggcctcccaaagtgctgggattacaggcgtgagccaccatgaccagccctccatttattaatttataaggggactagaaggacaaactatttgattaatttgaaggtgagaggtatcattttctcagatgctccaactaggcttctcacatccctcaaaggttatcagctaaagacaagagtttctgaggctaatgcaaaaacatggtcaaatgtgaaaccgcccttttagaggcagggtttgtgaaaggctgctggcctccaaaggagagtatgcctaaactctctgggctcccaggacctgtggtgacctcaagctaacctgatgcacagacaacagtatcttttagggactgcagccaatgttccccaatttactttttttttataccttaaaatatcaaatgtttcatttttaggtgatatcccaagtgacacagaaacacagctcctccggatggtgaagtctccgctgcaaaactcacgaaacagcacagaggatgactctagggtgctctcccacttgctccaagttaggcaggtgccctgatggaggcaaggctgagccattaacatgcacagctccatatcctggaagcctctgtagccttgaggagataggctctatccaacaggactcagaataaatgactgccacctcaactgagcagtatgaactgcccacctcaactgggcagtctgacctcttccacagtctttaagaaacagaagagccatttgcattatttaatcaccattcaataatctcctccctccccatagctgcttgagttaactgtcccacaagtgtcctgtgttttgtaaagatgagggttattttctgaaatgcagatgggactaggatgaagctgtattatcaattacagagacagccaactctcatttctcttaaagcaaaaattcattccactgtgatttctccaggtatttcctgcaattctaaatccgcccttgatattagagaatattaaaatcacacagttgtggcaaaaatcacattgtggctattaaatcctttttgtgaactaaaaaaagtgaatgtggcttaggctaagctgtttttttttttttttttttaaagatgaggatgcggactccaacaaaggcattaagaaagtactagatgaaaatgagaaatatgtgaaggataacatgtgaaatgtacactcaggtctaacaaatacctattatttctctggttaagaaggtttagcaggagcctccaatgagcactgtatgtagagaaaagggaaggagcaggaggaggaacagatctgcacagaatttttttcttaaaaaccacaaagggtgacttttttcttctaagcaagcaagcctgagaggcattacatgggctggctcctaatatcaaaacaaaatatttctttgccacaaaggaacttgactatgtagcaacacatttacaaaactactgcaaaacactcccagagggcagtgacctactctgctccccagaggctccaagaagcaaggcctcaagtgcctcatgttccatggggctgtgcagtgcaatgcagaaggcggaaatcctgctgtgacgccaccctcgagaccttctgcagcctgagagggggtgatactcccacaccctttgatccttccagatggctcagcctagatctagcagtgagagagccctctccatgcagggcagatggagtggtggacacttgtgaaaacaaaacactaactgttccatcctgttatatttgctgtgaggaaaattaagattcctgttgtatgggctgcactgtttctggaagactacagaaaatctaacatggttgacacttcctggtagcccttctgtacatacacacacacacacccagagagaagacagagagaaaatcctggtccaaaagatcacatgaccttactagtgtttccccaatgactgtaatttataaactaaaaatttttacaaatccactgctatcttcttctgtcctgagtttggtagactttaatggatgctccagcaataaccagaatctaggacatgcagactcactgtgagcgagaggctagggatctgccctaaacataggaacctgtttctatcaagcctgaatgaggtcagctctggtagaattaatgacaaatcaatgtcagtgaaatattctgcaaacagggtagcttttgtgctttcttttgattattttctttggggagataaaggtattgcaaccatgggtctaactaatctatcactaaaggactgtgacgacattctcaataaagacagtcatggtgtttactgtgccaaggagggaaaatcccagatcatcagaatcccagtgcaacagaaaacagcaccagtttcaacaattctgatgttggacaaagcctctttttgtcagttaagaaagcgtaagcacaatctctcagtcaattgcattaacaggaatccattcatgtcactgaaaaatacttcttggcacagttcactttcctgacccaaagacaccaacaacaatcaaaactgcactttcagggtagtatattgttacactagcccagtcaaaacatactcagaacatttaaaaatgtataaattactgttagcactgcagttccgttttattttcttatttatttattaagacagagtcttactctgttgcccaggctggagtgcagtggcatgatcttggcttactgcaacctctgcctcccaggtttaagcaattctcatgcttcagcctaccaagtagctgggattacaggagtgcaccatcatgcccagctaatttttgtattttagtagagatggggttttgccatgttggtcaggctggtctcaaactcctggcctcaagtgacccacctgccttggcctcccaaagtgctgggattacaggtgtgagccactacacccagccctgcagtccctttttaaagagtactgactgttttcctgcaaagtactttcaaatccataccataaaggtagaatttatctggaagaatgtgttttttgaattccacctggcacttggttaaatctactttattttgccctttatttatttgaacagaactttagaatgctctaggtcaggaaaagaaacagtgtgttcgtttttaagaaggatgtgtgaatagtaagttggcattcagactcaagtcccatggtattgttcttatccaatgggacctctccttgggaatataattcctttcccagaggtatcatggtatcccaagaatataactgctctttggctctgtgtgtgaagattgggggagaggatgtaaactaag

SEQ ID NO: 805 - DNA, 3444 bp, Homo Sapiens
gtggcagtgcctttgagggagctcttgcagagggcagccttttgaggtgaagagccagagctctgggtcttaagagttggaaagcaggttatatttcacatccttccctgaatagagaaattgaatttggtcaagaataagtcctaagaagcagttgtgagcaccccacctgtccatcttgttgatgaatatggagtgggagaaaagttgagtgtgggcatctgacaaggtctttatgatcctagatgcacttactataccttcttcctcctcctctgccttggctaatgggttgtgggtacccaccgcacagagggctataagacagtccttgtggctgatgcagaagctgggccctgccctcctggccttctgaggaaagtgattatcgtttttggcttgtttttcaactatccctttgcccccagcaggactgaacctttccactcttaccatctctgggtcccttcagatcttttatagccttgaactacctgctacaagatttttttctgtcctaagaatggaggtccggtctgcttcctaacattaatcccttccacacggcacagccttgttttctctagatcagagagatggcttctggattcatctttccctgcaatccagcttctcctcctggggccctcatactggagactgggatcatcatccaggcttttgcactgggccaggaatttgggagtcatcctggatccgtctgcccctgtcaacctttcgctgtcaacggatatttattgggcgtcctcaacagccaggccctgttcatggtactgaagaacagcttgtataaaacaaccctgccctcacagggcgatcaccagtgacctgtggtgtggagtctccttttacctatgtctcctccttcccactgtcaccatccttggtcctcctctgtcacctggaatactccacttggtaaccagcatgatcttataacgctagttttacccttgtcagcactttgccaaaaacctcaaataaagactttttttaaaatgtgcaatggaaaaataaagttataaattatatcataaccagtggacctctttttaaaatgcactgaagccttataatgttattcatggatatatatctatggtaaaaatagaaaaaatatatgatggtggtgcctctgaaagggaggggaatggtactggggaagggacaaagggaacttcaactttatctgtaatgacctgtttattttgaaactcaagagcaaaattgacaaaattttaacagtaacttaacaaaacctcaagtctggatagtgggttcaagagtgttactttatatggacaggcagtgactcatgcctataatcccagcactttcagaagccaaggcaggaggatctcttgagcccagccatcctcccgccttggtctcttgaagtttgagactagcctgggcagcatagtgagaccctgtctctacaaaaaaaaaaattaacagcaactcaggaggctgaggcagaaggattgcttgagtacgggaggtcaaggctgcagtgagctatgactgagccacttcactccaacctggatgataaagcaagactctgtctcaaaaaaaaaaaaaagtgttgcctgtaatcccagcactttgggaggctgaggcaggtggatcacctgagctcaggagttcgagaccagcctggccaacatggcgaaaccctgtctctaccaaaaatacaaaacattagccagatgtggtgggatcagtctgtagtcccagctactcaggaggctaaggcaggagaatcacttgaacccaggaagtgcaggttgcagtgagccaagatctcaccactgcactctagcctgggtgacagagtgagactccgtctcaaaaaaaaaaaaaaaaaaaaaaaaaaggagtgttacattagttgtctgtattgtagatacacttgtcaaaatttaagccataaaaccctcagtgtccctcactcttcccacccccttagcctggcctggcatactgggtctttcacaagcttgtgtcaacctcctctacagactcatctctacactgagggacttgcagtttccaagtgctctggccttggggcctttgcccatgctgttctcttctgaatgccctttcctgctttgctactttgttcttgcccttctggattcagctcctgggaggccctgtggatagaagtcagatggctcaagtaggcagctggttaggacccaggagacagaaacgtgtctggggaggacaacactttcttgtcctggtttctattcagctgcaactagagaaacagatcacctgtttcttgttcaaaactaggatcagtgagaggagggtggaaagagtaagatcctccacagtaccctcccacctcccagcctccccccacatagactagccccaaggcagaaacttcccagcagaaaaaggaaaactgataacctcattccttggtctggctctgttaggattatcatctggtttcccctgctggtgttggaagagctgtgttggtgcaggccagtgctatcctgtgactagagggaagaagctctgcctgggcctgatttggccacaagctcctagtaagatgctgaaaaggaacacaaactctaggcccaggacgccctccccatgccatcccacacctgacttctgcgcaccttgtgagcagatcagatttggtgttgcttcttccacatcatcctcgcatcccctttcacagactcggatatatcccctcatgggaacctatggatctacagcatatctatggatatgccaccccatggcaactgtcctttccccttcatagcatacatcaccctgaattatagctgcctgtttatgtatgtgtcttctgcaccaggtggtactccctgatggggcagggattgggtctgtcttgttcacagttgcatctccagcacctgcaactctgcctggctcagagtaagtgctcagtactttttgtttttgattgaatgatagaatgacgagtgaactctatttcccactagactgtgagcaccatgttgacagggaccatgccctgatcatctctggatccttagggcctatatagtgcttgccacataggaggtgctcagtagacacttatcgatttgagtgaatggacttcagtttctccacttacaatctgagtaagaggaagatattctttgtcctctctccctccttctccaaccacattgggggttgtggttgatgctgtgaggtcattcctgccttattcaacttcatgtccaaatcttctaatggcaaaacacaacatggtggccaagtctcagagtccaggcatccctcccatagcccatagccaagtatgggagaagggtgcttcagggtctctctccattcactttagtctccagcattagccaagatcccactgtctaccctgaattcttc

SEQ ID NO: 806 - DNA, 2635 bp, Homo Sapiens
caccaaaggatgaggatgaagaagtgactctgatgagcttgcagcaagccctagcagggcaagccccagccccaaggatctgcaccccgcacccggtgggcccagcgtgggagaggccgggagcagcagtgggtacctgtgcccaggaaaagcacctcatagcgcccgtcggctgcatccacctggtccacggcaatagtgccagagcaccctgcctgcctgctgggcactcacggagctcatcaaagtgagtctcaatgccatcctcgcccgggacagagcagacgagccgcgccttcaggaatgtgctccacttgttgaccaggcaacagtgaccaccgtcatcgttctggggggtggggcaagaggccgggtcagatcagctcttgaccccaagccctggctggagcagggctgatgaagccagaactggtggaaggggcagcctggtggctctgccaatgcataccaggcaaatgcgcccgatgcgggcgtacaccgcggggctctgcggcgcctctgccgaccgctcacggaagaagaagtaaagcttatcatcattgcgctccgcactgtcaggaatgagctcagcatggatgaacgacgggtctgcaggtggcaggggtcagctgggtgagcccctactctgatggtgcccctgatgttctccaacagaatccccagccaggtgcaagaacacccccaactcctctccagataagaaactacccctgccccaggtagtcataggctaaacatgtccccacttcccccacatgtgcttctttacgacctccttgccgcatcccagacacatggccacggaagggctcctggggctgcgcttaccgttcagccaccgggagttgtactgatccgtgcgcatggctgtctgctttccaagtgtgcggaagatggctgcatcagtgcccataaaatcgatgtacacaccagcatagagctcctcatctgtgggtaggccagtgggtcagttggggggctgctgtttgctagggccagggcacagctcagatgacttccagggcagggccttatctccccgctcaggctccctggggcatgatcctatctccagtggagtgctggtcagtgtttcaccactggctctgggagggttgggattagtaactatcagctctgattagtagcaatagcccatttctgtggtgtgaatactcctgccacaactaatttcaagctaccaacctgaggtcactgaaagcaaaatcaggaagagctgccaacaccactgtacagtatttctaccccacagacacaacaaatgtaaatcacctcaagagcatagctaatagaccagctgcagtggctcatgcctataatcccagcactttgggaggcccaggtgggtggatcatttgagggcaggagctggaagccagcctggccaagatggtgaaaccctacctatactaaaatacagaaattttctgggcatggtggcaggtgcctgtaatcccagctacacgggaggctgaggcaggagaattgcttgaaccagggaggcggaggttgcagtgagcgagatcatgccactgcactccagcctgggcaacagagcaaggctccatcttaaaaaaaaaaaaagaggccgggcatggtggcttatgcctcctgtaatcccagcactttgggaggccaaggctggcagatcatgaggtcaagagatcgagaccatcctggccaatgtggtgaaaccctgtttctactaaaaatacaaaaaaattagctgagcgtggtggtgcacgcatgtagtcccagctactcaggaggctgaggcaggaagatcccttaaacctgggaggcggaagttgtagtgagccgagatcgcaccactgcactccagcctggtgacacagtgagacaaccgtctcaaaaagcaggaacaaaaataaaaaaaaaaaacacaaaaaaacaaaaaaagagcatagctaacaataaagtgtagtgaaagaattaggaagcatatgcacacctcagtttactgggctttgtgcactgcaaatactgcattttttacagaaggaaggtttgtggcaaccctgtgtcaagcaagtctgttagcaccattttttcaacagcatatgcttactttgtgtctctgtgtctgtgtcacagtttggtaattcttctttttttttttttttgagatggagtcttgctctgtcacccaggctagagtgcagtggcaccatctcagctcactacaacctccacctcccaggctcaagcaactctcttgcctcagcctcccaagtagctgggactacaggtgcccaccactacatctggctaatttttgtatttttagtagagacggggtttcaccatgttggccaggctggtctcgaactcctgacctcaggtgatccacctgcctcggcctcccaaagggctgggattacaggcatgagccaccgcgccttgcctacattttggtgattcttgcaatatttcaaactgtctgttatggtgatctgtgatcagtgatctttgatgttactattgcaattatttcggggcaccgtgaacctcacccatataaaacagtgaacttaatcgataaatgctgtgtgtgttctgactgctccactta

SEQ ID NO: 807 - DNA, 6945 bp, Homo Sapiens
agccccagcgctggctgcggcggaacccacggcgtaccttcccgcctccaacaaactatccggttgctgaggttgatttagcaacaccccagggcatctgggttggcaggagcaccacagtgacagcctggcccaggctcgggtacgggaggcagcccagtggcccgcagtagagggccaggctggggaccagggagctggggctgaggagaatttgtacagcctagggaggcgcagcacagcagtatcagcctctggcatttgtaccacctttagtcctgccactttctctcactgtggcttcgcaacagacttgggaaccaagaaaggcataggtgaggaagctgaagcccagtctgggctcgcggaagaaactggtggatccaacttctgcatagcgcaaatatctgcttcctgcctccacccacccattcccacttccgtgagtatattcatccatccaacacttattattactccttgccaggacagttctaggggctggggatagagtgaacaaaaccaaggttctgccctcctggagttcacgttccatgggaatgcccttcttccaggctcctccctcagtgcccaggttgtggctgtgggaggctggtctacctttgtggtttagcggtaacttacgtgattcccacgtcaagtgtaagctccttgatgattggttcaatcttcacctcaaatttctgaggacctacaaactacaaagcactcttctaggggcccaaagataaaacgctcccctcgtgaaaatcccggacttttggtgggaggtggggaaggtgacaactatgctcataagcttggctacaagaccggcgaggccaagagctactttggtatcctgacaaggactgatgtttgggagggggatccagcagatgggaacaccacgaaggtggtggtgggaaaagtcagcagtcacagggtggttcaccttgtggatcccactactgcaccagcaaagagcaggctgggcacacagagacagtcaaaatcccagcttcctttccctctgcttcacattcttccttccgcaggcaggggagtttgaaccttatccacagggccaagcctgtcccagccctctaggcaaactggcagaacaggcagctggcccctcacaggcactccgggctgggccagtgcaggtcgcagcagttgttttacctatgaacatcaagcacatggtcaaaccctcagcttaggtgccccaggcaggcgggctacacacttggtagcatttcctttgacacaaggagcagccatggcccgggctcagagactgacagcctctgcctgcagggtctgcgtggtcatttctcctgcttctcagaaggtggtgagcttttcccaggaaaccattataaggaagtgcccattctttatcttgttctctctgctcacttcccttagcctgattggggaactctagagccccacatcagagttcaacatgtgcctcaggagcttcagcacctcttttgtgggaggagagtccgctggtgactggggctgcaggccatgacatcagcctgcccagcttcacctcaggctgcttccaacagtgccaagtgaggtcccttggcaggatccctgcaaggcagcggctggccaccaggaggcagcagcctactctacaaggcactttcttcattccaaccccttgtaacaggtctgaggaaacctgttcgcccagccatgtgctgcaaccatcctccactcccaatcttatctcccaatagcacagattcccctatcatgagtccagacttggccttcatctcctcttgccttcctctgtccaaggaatcactacagagattctttctctatccttctttgtaaatttccagaaaattgtttccccagggcccctccccttgaagaaattaaacaggaagctggagtagactgtcccttctttcccccacctctcacactccaaagctctgtttaactctgtgggccagtggctagattccccaacatggatgacagagaatacacatgcaataagaatgttttcgctgccaccagccactcacagacacactgtctcccaccctctgaaggcattgtgcccaatccccagccactcactgtctagtcagggctgcccctgcaggacttgccttggctgaggaccagctagcttcaagccactctgaagtcagcttgctgtttcccctggagcctggtaatacatccttcttcaggtgaacaaaagcagaaaaagcccagtgaaccccactgcaacaaagagcctgccatcagtcttccttctgttcctgcctatctcatcacccaagggctatcccagagcccactatgttctaagatctattcctttcaccaccacccagccaaacaactatccagacaattccttgatcaaacaacactgccttcttgagtttaaattttattttacaaaaagagaaataaagaaaactgataggcagttatactgacttacaattgttctgtttgcttttttttaaaaaagtgacatgaaacacaagtaaaaataaatacgtcatagaaacagccagttgcccagtctctggggcaggagcgcctgccctgctgagaggagggaagcccatgatcacaccagcagctggatcacccagccacagatgctcctcgaagccaggcacaggtcccaggcctcaggggcgtcctgaggaaagaagacggaaaaccaaagccaggtgccaggaccctggggccacctcattatcccccactcctcctggcagcagtctggtcttagtggttatccatagcgaccccccttaacccacctggaccctcttcccctgacctctctgaagatggtacaagggaaaaacctgtcttgggcaggctgggggggattcttctggtgagtccccagcccaccctgagtaacacaaccagataacagtcattttacacccaggtgcacatgagcacagcacacaaacacacacacacacactcacacacacacacacacacagctgggctgagctctcttccagggagggtcctgggtccagtcacagtatgaggtcctctctcttctgaatatcatcccagtagtggcagcagagagtacccaaacctccccaagccctctgcattgcagacactgcagcctgcttggctacccctccccaacacactagattactatgtcaaatagacctgcaaaagggaaaggtgcacactcaggtccctgaagagcaaagaagttggacactgcctgctcaagaagttcattgttataagactcaggtattcataaaaggcctagggctaagctagtagcacagaaaagccgttaaggggatcacagcagaatacacagggcagaagagaagagttggcagcaggggaacggagtctcaaggtgaccaatagagagcacaacattctcaaatagtccttgaggtgctgattcctgggagtagtcagcagagggccagaacatctcccaggggtccttttggggaaggatgacttcacttagttttaggggtgaagagccactgagctgggtgcacagaaggccatggctcagaagggaaagactgatctgagaaatcaaaaggaagtgggggccaggagcagtggctcacgcctgtaatcccatcactgggaggccgaggagggtggatcacttgaggtcaggagttcaaggccagcctggccaacgtggtgaaaccccgtctctactaaaaaatatacaaattagctgggcatggtggtgtgcacctgtaatcccagctacttgggaggctgaggcaggaggatcgcttgaaaccgggagtggaggttgcacggagccaagatcacaccattgcactcaagcctgggtgacagagcaagactctgtctcaaaaaaaaaaaaaaggaagtgggaagcagaaggtaatatccagaacactagtaacaaggaatgtaaagcccccagaagaccttccccatgggatgaggactcaatttcagagcaatgccaggtttgaatagactcacacagagggcccttctctgctgacaactttgggagtgatggtcctacccaggccacttaagtttggctaagtgtttcaaccaatctgcaaaactgtaccccagcactttgcttcctgctcctgaattgagaaatttcatatttagttgtgaatcacaagcatatagagactccacacactaattcctagggaagagagctccaaggatcacaagcatatagagactccacacactaattcctagggaagagagctccaaggaccagacagaattatccttaaatcaggagatgatgagatagatgcctaaaaagcataactcaaaggggtgtggacttcatagatatccaatctaaagaaaatgatatgacccaacatggttcacttcctttcttaaatagctactttgtccctgttcaatttttatctacaaatatattaagaaaaggaaatcaagcatcactataaatggtaaacctcaatcattaagtagtactgtgttccccaggctgagaacttggctaaaccagatgaatggggcttgagaggcccttgaaaacattccatggaagacaatggtaagggaaaacgcctaggcctgattttctgccctccctcttatcaccagccaccctgcccccctcaggcctggataatgggtggaagacaccaccaagtgtttatgatcaaagaaactataaaacatggttcttaggctctgagatacttcctgcttccctcacaaacatgcttatgtttggtgtgcatgcacatttgcctatcagcacatataaagagacagtggaaaagtcagaagtgttttcaggttattttctttaaaaaaaaaaaaaaaaaaaaaaaaaaaaaaaaaaagcaaaaaccatggacctggtagcactccaatttcccatgatcccacccccaacccctctacacaatagaaactgcacatataaaagaaagccttctctagtcaggtcagcctcccagaatgatggcctctgctgagtagaagcaagacccagtccctggaacactggatagacagtaggcatgtgctgcctctcagaatacccatttactttctgtcaacttcaaaagccaagcccatccctccagggaatggtttcagttcccggctgggaaggtttccggattcttggaggctagtacagtgatttcctagaagtgaacacagaaatactacccccttctcccgacaacacacacacacagacatacacatgcacacatgcatctctgggatcccagtgctccagggcctgagaggcatcagtgtaacccaggttctgagtgtgtcccataaattggagattcagtctagctcactcctactgcaccagcctcaacctgagagctcactccaactgagtcccttcaccatccattcttgggatgcatctgaaagagaaagcactggttggaactgctatttttaaattattaaaataatttgcatagctaaattgtagatctaaggcttccatgagtagaagagttaagtgtctggcagggtgcttatgaaaacacaaagcttcttaagttccacttttggtgttattggacagcagacaaacacacatatacacatgcaccccatccatcatctccttgtctcttctctgaggacaataccccagagtctgctaaggccctccaaagatggaaatgggctggtcagaagagctgtaggagctactactgggatgacctgactaagctgccttctgggctgggaagaggcaggtacaccacctgcccagtaaggagggagccatgggtaagtggtaaagctctaaagccaaagtttgttcatcataaagaactgtctggcaaagtgttggggtgggggatacagagggggcggggacaccagtaggaagacagccagtgtttatgcttaaggactagacgaccctcccctggcaatggcaataaggggagacccagaatgactggtgtgttcttttaagataaaacccagacttagggctcctacagagaaagggctcctccatgttccttcaaagatggaggcagcagacaccaggcctacatggaccacctgaagatattttcgaacatgaaatcaacagtccctcaacccagcaaccgcctatccacagcttcactattcagcatagagagccaacatctaacatcatcccaggaggacacagctccaaatctggggtctcttacttcccaattgcaaactccatgatcacaactttcgatttctgtggaatgagtcccaccctccactaactatccagtctcaggattccctgatcttcctgaaaagccatctctcaaaaatatagttgtttaatccaaaccttggtcaaacctaactcttcccctggtcaatttaccatccatccaggattgtttttcaccagtggctatagggtctgggatatcttaaaacttccctttctatcacctaccctccttacccctaacctccccccacccccaaataaacaagacacatgaaaagtccaagtaataaataattgcccataagaaataaattaacatggagctctctaaaggggaaggaaaggaacagaaaagactaccaggataggcagctctcttgggaaagaatgttcccaaagacagaaatgggatgtgcgcttctacactcagatgggcgagcaagcaagcagacagcataagcaaggcaggaaggaaaagaggctgcactgcccctccatccctgttttgggtccctgatttcccgctattgctgctgtgttggacttttttttttttttttttttttttgcctcttttgttaaacagcaacagagctctgccactttggccaaccaccctcctttgtcctcttccttttccctcctgccaagtgtcc

SEQ ID NO: 808 - DNA, 3422 bp, Homo Sapiens
ggagagccacgggcccgcgcccgagacccgcccgaagcgcgccgagctcgtgtgggggcccaagcccaagcttcctggcgccgggcgccctcccgtccggtacttggagcaaacggtgtccatgaaggaggcgagtggcaaatgatgtggtcaggaccatggacaggtctccttggttgaaaaggattcccacccactgactctcagatttggtaatagtaagtctgttttggtttcgtttggttttattttgttttgttttgcccgaatcagccacatactcgtctcagatctccgctgtggagaaacagctagttggcaaaaagcaaaaaggagagaggaatcctgagcacagcagtggtctctctctctctctctctctctctctctcacacacacacacacacacacactcacttcaccccttagcctcgctcttgataagccttgctgccacacagagcttggcttacctcttggaactctgagttggaatttgtctacacattgcaaacgcacatttgaagccacacaaaagtcagggtcagacggacgttttgacaaaggacctggaaagcatgtcacacgcaggtttttaaaaatttgtaaacctgtgaccattgtgaacagtcccaggccaaccctgagcacaacaacaattggccacttagtttttacttaagatacttgaaccgctcaaccatttacccaactctcaacttcatttagtaatttgagaacctggacaatcaacggcataaacaacattgagaaatagggagtttagtgattctctcttgtggaggaaatgctaattcctagagcaaaatagctatattagggactgaaacaaagaagaaaatattttacacttatgtaagtaaggttggactgtaaatctagagcagaaactgtcttccattgcttttatataacctctccctcagtcgcattttatgctcaatagacattcatcctttaccattttctttagttcagtgagtatctgtgaagccggcactgtgctgaaaactggctacaagcaagaattgttattgaaggatcaaagaaaatactgttttactcaggaaacattaaaatgcctatactttaggaaagctccatgagagagtttatgatggacatctagaggattcgggtaaaatgtttaatgacattttccccaggcagcctcccttaaaacagtcttgaactccaagacattgatctgaacttgacaccacagttgtaagttgtggtttctggctagttctgagtaacccaattgttcaaacttttaaagaatttcatattgaaagcccgaaaaatgtattcatcctttcctcaccaattacatagttactaagtaaataaccagattatgtgagtttccataacctagattaacatcgctactatttgtccaggagacttatttgtccaggagactcatgtggatgaactggggaagaaggaagatagttcctagaaggaggttgttggacagaaagaacttaacttatgcctagtgttccattattggaacgctaagcacgcgggagttgtttacatcctgctgctcaaggtcatcgccaaggtctgattgcaaaaattctaaaaattgcaacctcagggataaatgagttaagtagtaactacaaaggtactgtactgtctagacatccacctcttgtctaccttctaactcttttgcaagcacttgcctttcatcgtacttccctgcagttcccttacagcagagctatccaaaagaattgtccgcaactattaaaacactctgtatttgtgctgtccaatacagtggcccgtagccacctgtgactattgagcactttaaacgtagggagtgcaactgaggaactgaatttttagctttatttaattttattcagtttaaagtttaaaaagccacttgtggctattgtctgccatatcaaacagcatagacttagagctacagaaatggcatggtagtgttcagccaggaactaagaaagaagattatttaatgagcacttggtgagataaactgtaatgtctgtagtgggaaaagaatagcagcaatttcccatgtttggcaattctatctaatgacctgacactgttaagaaatatatccatcatgctgtgtggaggtagttaaagatggagatggaaaaaaataaccagaaatcagaataattttgttttctcttccatttcctccagcaaatattttcctcaagagttgtcatttactctactatagatagcacagttataacagggaaaaactaacatgaaatattctagaattatttttgttcacttagatcaaatggtagtttttttcctgccacctaaagctttagaagtaacacaagctctagcaaagaaaagaaagaagtaagcaaatagcacggacactaatttattatcctgtgctttccttccatggtatcttctaagcgtttcattcagacagaagggccaactacacttccttttcctctgtaactatgatattattcctgtataatctgctataattttcttattgctcactgaagttattgctattggctagctgcatagagcagtacacagaggtttttcaaaagaataataacacagcacgatactggcctgtcagctcgtaggagtgaacagaacttttaaacatatagaccaatttaacacaaaatgatcaacaagtacatgcttagtaggatacaggctactgtaactaagtgttcttattcacaacaaagaagttattattttgttctaggtaacagtacttgactatatttaaaaccttttttcacagctgagtgttcccatgataatgacaagtgacatttatatagtgactttcactcagaggtcaaaaagtgtgccacacaccttttacatgacataaatatgtcacccaccagtaaatacagccacctatcatgtagaaagcggaagcaacttttagaagccctaaagaatatatatatacaggaaagaaattgaattttacacctagaataaattgagttagatgagaaaatggtcttctgctgcaaaaacattattcaactcttcttggtttatataattgcaaatttggacagggtaatgatgtgtggaatagaggaaggagagtcaaagcaaaagataatttaggataatctggaaaagagatgattagggcatcatttagaaaaaggaggtaaaataatgggcttgatcagaccagagagtctatgagggtcactaagatcttttattgcttacactgttcaaatacaatgctgtcaaacattgttctttgtataaaaataggtgctcaataaattgttgttaaatgaataaattataacaggcttggtgtcatgtatcctttataattgtagttcttaaactctgatgca

SEQ ID NO: 809 - DNA, 2679 bp, Homo Sapiens
gatctatagtgatttgctcagtgccttgcacacaggcactgttgggggctgctcccagaggttgtgttgcagggactggagagaggacttcccagtacagggggtggccctctgatcaggtgggggtgggtggcagcagagcatttggtaggaggtcaggagctcacaggagatgggattctgccgatgcctgctgaatgaatgagggagggagacggcaggaccagggactggggaattggtactaaggtgctgggtacctgccgggcactctgtccatacatgatctcagttcagctctccaccttggaaacacaagaaaggagccgtggctgcagagaaaaacagaggctggaaacaggggtacatgggcagggtggtggtggtgagagaattgcctgaatcagctgccaaatggtgcccaggttggaaaagcaaatgtgcacacatgggttcttcccactctaaccctgaggaattagaggcctgcttctgacacagactgggcagtggctagtgactctaggtatagagtatccaggccctgctcacccaggctagagcttagggagccagaaggaaggaggtgcatgttggggtgcaggacaggagggaaaaatactcgaattgcaaggtgagggcacagtctatttatattgggttgaattaactcctccccctgatgccactaaagcaggaatcacactgcagatggcactgatttgattggcaagagacatgccaggaagaatattaagggaccggacccctataattaggcctaatcatagcctgttgtttgaaaagggcatgaaggacattcatcaggcctggcactgtgccctagacctgctctcctgggtagtgggaccctccgtggcaacagaggtgtgggtgggcctgggtgagtgtggcaagaaatgcctcggaggctctatttggccttaaagtgctgtgtgaccttggataaactgccctctctgaatctctggtcctttccatttcccattctccaggctgagaactgcactgtgatatatggttattcccataataataatgtgtgtatcatgcataatgcactgcacctcttcaccacgctggtgcccactcttctgctccccctgccggattcctcagccccttctaccctgatggttctctcctttcctcctcaggccagcacttcccatgatctgagatgtccgtcctccttcctcttcaactttttctccagcagtgagttcctcctcctaactgaggcttccaggaaggatatcctctgcttctcagacctgaacctgccttgaatactcatgaggacccaggagctactcctcacctcccacttctcttccctcctgtcagataaccaaggcacggccaactgatctccaaccatctgaggaacccaaccgtgtgagaccacccacacctttcaagaatgttcctcccctccccttctttgtatttatactgatgcaaatttgctggccatcttaactcagtcctgtgcctcagttctcccacctgtaagatcaggaggaggataaagatgtaagactttctgcacacgttttaagatgaattccttgttaccacatctgagggtgtctgtgtttactgtactatccacgtgagaggattgtacagacacgaatctaaacaaggaagtagcaagtccattcaagcattaagaggctgattagtggtttattcattctgtctgcaagcatctactgatcatctattcagtgcagaccattatcacaacaaaggtgaataagacactatgcaatagccagggaaacagcctcaaaaacagttaaactctaatccagccatgagtacaatgctaaggagggacaaattcccttctagggctagggaagtcaggaaaaaacctctcagcagaatgtgtgcctctctaccaggcccagggagaaggtgcagagacagcattccaggtggggagcagtggctcacacctataatcctagaagttgtgtgggaaccgctgagcggaacaccctcccccagcgggaaatccgggacacgcaggagcctcagtgaatccgaccattgtctcatctcaccaggtcacccggctggaaagagtggcagagccccgtctggtcaggaactgggttgggatgagctccccggacaagcggctggatgatgtcttgtacctgttggagagactgcagggtttgaggagggagagaagagccaagtcttggaggcgctggacttgctgcgacacaggaaaacgagatgtgcagggcaagggatggcgatgaggaggaaaggggccacttggatctttcctaaggtaggagagtagtcacagaggataagagtccagctggagtgaagcagtacgggggtagtccttctattttagggttgccagataaaatacagtatgcaaaatcaatgtgtctgatgtcttgaacagctgttgcctgccaaaatggacaaagaaccaagagcagctgcaggccacgcaccaccactgggattgctgtgaccttcctgccttgcccctgggtcttaaatcaccaaactctatggctcacactgggctgacactgctgaccttacagccttgcaaatgatgtcatcaccatacgttcttcactcatgacgtggcatggatttgaccaaaggcgtgat

SEQ ID NO: 810 - DNA, 1055 bp, Homo Sapiens
gcaagctcaggtggcaggtcccatctgatggaggagaatcaattcaaggagatgcccttcctttacagaacaccctttaacagcatccaggaggaacgagaggctgcaatactgaggctttcaaagtactcacgaggatgtccgagaatggctgtgatgccaggcttctggcaggttccagactccatcacaagcccagcatccctgcaccagatctgacatcgctgctgttgtgccagctgtttatgaagggcctgagtagctagcaggtttttatcaggagccctgctgggggcttagacaccaaaagagaagactcatcctctgtagttcttcttgtgaatgtccttttagaaaaacaattagaaccaaccacaagcaccaaagtcctaatgggatctcctgcgagcacatatcaagcaggattgttgctatttctcctcactggctctttggacagactgtgtgagctcctggagggttccactgtatctaccctttgacactgaccagttggcacatggtgacatattccaatgtgttgattgcaaatgtgaacgtacagccagtgctgtgtgcgggaggactctctcctcctcagtggggccacaccgtgcactattaatggagccccactcctttgcacagcctggccatgcagtggctcatattgaggttttagccaactgaaatctcccgtgcatttttctgacaagccagctaggcctctgctatgctgtccttgtgtctttcatttgatgaccttaagggtgggactgttttatcttaagttacaggtggtcaagtccagcccaaggacagcaactctgagggtcaagcctcataggctaactggatagatgttctctgctttgccacccactggagcccgacctgccccactaatttatatttcccctggtctcattttgtactttttatttataattcacccttaaagtgtatgtgtctcttataagctgcctccgatctttcatggtatgaggtggttacctaaataaagaaggagatttggcctttgtttttatgtaaca

SEQ ID NO: 811 - DNA, 11532 bp, Homo Sapiens
agcacgctggcggctaccaagctggaggaggcggcgggcgcgagactgggaatgcgcagggccccctccctgcccccacagcctgggccacgggccccatcttccccgctgctgcgcggcactcagtgcccaccccccgacgaggccggcagctgctcccacccgggggcgttgtcagctgcgccgggccgcgcgctgggaggcgagggcacgcatggggagcctccgttgatgccaccaccacgccgccctccgaggctgcgtcccgggaagcccggctacccgagcgctccggcctggcccggtgccccggacctgagtgtgtccgcatggaggagccccgactggcccaggcggccgtggcggagagcgacccccgagaggtgtgggaggagacccccggctgggcacccgcattctgccccagccccaaggcctggtcgccggagccgcctgcccaccgcctgcaggacttcgacacactggccaccgtgggcactgggacgttcgggcgggtgcacccggtgaaggagaagaccgccaagcatttcttcgccctcaagttgatgagcattcctgatgtcatccgcctggcaggagcagcacgtgcacattgagaggtgtgtccggaaggaatcatccgcccgtccctcatctgcgtccggaaggaatcccttcctcatctgcgtccggaaggaagtcatccgcccgtcgctcatctgcgtccggaaggaagtcatccgcccgtccctcatctgcgtccggaaggaagtcatccgcccgtccctcatctgcgtccggaaggaagtcatccgcccgtcgctcatctgcgtccggaaggaagtcatccgcccgtccctcatctgcgtccggaaggaagtcatccgcccgtccctcatctgcgtcccgaaggaatcatccgcccgtccctcatctgcgtccggaaggaagtcatccgcccgtccctcatctgtgtccggaaggaagtcatcagcccgtccctcatctgcgtccggaaggaagtcatccgcccgtccctcatctgcgtccggaaggaagtcatccgcccgtccctcatctgcgtctggaaggaagtcatctgctcgttcctcatctgcgtccggaaggaagtcatctgctcgttcctcatctgcgtccggaaggaagtcatccgcccatccctcatctgcgtctggaaggaagtcatccacccgtcgctcatctgcgtccggaaggaagtcatccgcccgtccctcatctgcgtccggaaggaatcatccgcccgtccctcatctgcgtctggaaggaagtcatccgcccgtccctcatctgcgtcctgaaggaagtcatccgccctttcctcatctgcgtctggaaggaagtcatccgcccgttcctcatctgcgtcctgaaggaatcatccacccgttcctcatcggcgtcccgaaggaagtcatccgcccgtccctcatctgcgtccggaaggaatcatccgcccgtccctcatctgcgtctggaaggaagtcatccgcccgtccctcatctgcgtctggaaggaagtcatccgcccgtccctcatctgcgtcctgaaggaatcatccgcccgtccctcatctgcgtctggaaggaagtcatccgcccgtccctcatctgcgtctggaaggaagtcatccgcccgtccctcatctgcgtctggaaggaagtcatccacccgtccctcatctgcgtcctgaaggaatcatccacccgttcctcatcggcgtcccgaaggaagtcatccgcccgttcctcatctgcgtcctgaaggaatcatccacccgttcctcatcggcgtcccgaaggaagtcatccacccgttcctcatctgcgtctggaaggaagtcatccacccgtccctcatctgcgtcctgaaggaatcatccgcccgtccctcatctgcgtctggaaggaagtcatccgcccgtccctcatctgcgtctggaaggaagtcatccgcccgtccctcatctgcgtcctgaaggaatcatccgcccgtccctcatctgcgtctggaaggaagtcatccgcccgtccctcatctgcgtctggaaggaagtcatccgcccgtccctcatctgcgtctggaaggaagtcatccacccgtccctcatctgcgtcctgaaggaatcatccacccgttcctcatcggcgtcccgaaggaagtcatccgcccgttcctcatctgcgtcctgaaggaatcatccacccgttcctcatcggcgtcccgaaggaagtcattcgcccgttcctcatctgcgtcctgaaggaatcatccacccgttcctcatcggcgtcccgaaggaagtcatccgcccgttcctcatctgcgtctggaaggaagtcatccacccgtccctcatctgcgtcctgaaggaatcatccgcccgtccctcatctgcgtctggaaggaagtcatccacccgtccctcatctgcgtctggaaggaagtcatccgcccgtccctcatctgcgtccggaaggaagtcatccacccgtccctcatctgcgtccggaaggaggtcatccgcccgttcctcatctgcgtctggaaggaatcatccacccgtccctcatctgcgtccgaaggaagtcatccgcccgtccctcatctgcgtccggaaggaggtcatccgcccgttcctcatctgcgtcctgaaggaggtcatccgcccgttcctcatctgcgtctggaaggaaatcatccgcccgttcctcatctgcgtccgaaggaagtcatccacccgtccctcatctgcgtccggaaggaagtcatccgcccgtccctcatctgcgtcctgaaggaagtcatccgcccgttcctcatctgcgtctggaaggaagtcatccgcccgtccctcatctgcgtcctgaaggaatcatccacccgtccctcatctgcgtccggaaggaatcatccacccctccctcatctgcgtccggaaggaggtcatccgcccgttcctcatctgcgtccagaaggaatcatccacccgtccctcatctgcgtccagaaggaagtcatccacccgtccctcatctgcgtccggaaggaagtcatccacccgtccctcatctgcgtcctgaaggaagtcatccgcccgttcctcatctgcgtctggaaggaagtcatccgcccgtccctcatctgcgtccggaaggaatcatccgcccgtccctcatctgcgtctggaacgaagtcatccgcccgtccctcatctgcgtcctgaaggaatcatccacccctccctcatctgcgtctggaaggaagtcatccgcccgtccctcatctgcgtcctgaaggaatcatccacccgttcctcatcggcgtcccgaaggaagtcatccgcccgtccctcatctgcgtctggaaggaagtcatccgcccgtccctcatcggcatcctgaaggaatcatccacccgttcctcatcggcgtcccgaaggaagtcatccgcccgtccctcatctgcgtctggaaggaagtcatccgcccgtccctcatctgcgtccggaaggaagtcatccgcccgtccctcatctgcgtcctgaaggaagtcatccgcccgtccctcatctgcgtctggaaggaatcatccacccgtccctcatctgcgtctggaaggaagtcatccacccgtccctcatctgcgtcctgaaggaatcatccacccgtccctcatctgcgtctggaaggaagtcatccgcccgtccctcatctgcgtctggaaggaagtcatccgcccgtccctcatctgcgtccggaaggaggtcatccgcccgtccctcatctgcgtcctgaaggaatcatccacccgttcctcatcggcgtcccgaaggaagtcatccgcccgtccctcatctgcgtctggaaggaagtcatccgcccgtccctcatctgcgtcctgaaggaatcatccgcccgtccctcatctgcgtccggaaggaggtcatccgcccgttcctcatctgcgtctggaaggaatcatccacccgtccctcatctgcgtccggaaggaagtcatctgcccgtccctcatctgcgtctggaaggaatcatccacccgtccctcatctgcgtcctgaaggaatcatccacccgtccctcatctgcgtccggaaggaggtcatccgcccgttcctcatctgcgtccggaaggaatcatccacccgtccctcatctgcgtcctgaaggaatcatccacccatccctcatctgcgtctggaaggaagtcatccgcccgtccctcatctgcgtcctgaaggaagtcatccgcccgttcctcatctgcgtctggaaggaagtcatccgcccgtccctcatctgcgtcctgaaggaatcatccacccgttcctcatctgcgtcctgaaggaagtcatccacccgtccctcatctgcgtctggaaggaatcatccacccgtccctcatctgcgtcctgaaggaatcatccacccgtccctcatctgcgtctggaaggaagtcatccgcccgtccctcatctgcgtcctgaaggaatcatccacccgtccctcatctgcgtcctgaaggaatcatccacccgttcctcatcggcgtcccgaaggaagtcatccgcccgtccctcatctgcgtctggaaggaatcatccgcccgttcctcatctgcgtccggaaggaatcatccgcccgtccctcatctgcgtcccgaaggaagtcatccgcccgtccctcatctgcgtcccgaaggaagtcatccgcccgtccctcatctgcgtccggaaggaagtcatccgcccgtccctcatctgcgtccggaaggaagtcatccacccgtccctcatctgcgtccggaaggaagtcatccacccgtccctcatctgcgtccggaaggaagtcatccgcccgtccctcatctgcgtccggaaggaatcatccacccgtccctcatctgcgtcctgaaggaatcatccacccgtttctcatcaggctgtgctggacggggcatgactagcgcttcctctgcaggctcatggagtatgttccgggctgtgagctcttcagctacctgcgcaaccgggggctcttctactctgcagagatcatctgtgccatcctgcactctaaggagatcatctacagggacttgaagccggagaacatcctgctggatagggacggacacatcaagctcacggactttgggttcgccaagaagctggtagacaggacttggaccctctgcggaatacccgagtacctggcccccgaagtcattcagagcgagggtcacggaagggctgtggactggtgggccctcagcatcctgatattcgagatgctctcgggatttcctccatttgtgtgtgtgtgtgtgtgtgtgtgtgtgtgtgtgtgtgtgtgtgacaacatgtttggcatttatcagaaaattcttgcagacaagatagatttccccagacatttggatttccatgtgaaagatctcattaagaaactgctcgtggttgacagaacaaggtggttaggaaatatgaagaacggggcgaatgatgtgaaacgccatcggtggttccgctctgtggactgggaagctgttcctcagagaaaactgaagcctcccatcgtgcccaagatagcccgcgaaggcgacacctccaacttcggaacttaccccgagaatgactgggacacagccgcgaccgtgccgcagaagggtttagaaatcttcaagaatttctgaggacaggagctcacatctggaagaagcaggaaggctggaatctgcctgcaacaaagagctgctcctgagcagaccagtagcaatgtcttcttcacgtgataaggacatttccacttttctgtctttgtgcctgtatgtatagaaacagatcagagcacagttgaaattaatgtaactggcattatttaagcaactggaattccacactgtaggaaggttttgaaaattgtttgcttgtagattttatcttatcctttagtgttgtgttcctactgtgatgtcttggtttttctcatagacttaagtttataagtttgaactggacttgttcaattataaccacaaattgtgtgtgtgtgtgtgtgtgtgtgcatgcgcgcgcctgtgtgtatatatagaagtcattatggcagatccacagaaattgtgcaatgatgtaaatgttcatacttcacagagcctataatttttatttttcaatttgttttttcaaaaatctcttctcttggggacaacatctgaagggtctgttgcatggatttaaaaaaatcatctcacatgcattttttagtttgggtgaagaaaacatcatggggaggtccatcttcagtatctttagtgcttcctacctggtaacttgagactttaaaagaagaaacaaagagaagaagatatgggagtgaatttattccaagaatctacaatgacattgaagttgttggaggaatatactgtatttaaaaaacctgtgtcacattcaaaaatttcatctaagctgggcgcagtggcttgttcctgtagtcccagcacttcaggaggctgaggtgggtggattgcttgagcccaggagttggagaccagtctgggaaacatggtgagatgtcatctctctacaaaatacaaaaaaattagccgggcatggtggcgcttgcctatagtctcagctactcgggaggctgaaatgagaggatcacttgagcccggggaggtccaggccgcagtgatccgagatcacaccactgcactccagcctgggtgacagagtgagaccctgtctaaattaaaaaaaaaaaaaaggcaatggctttgtgcttttgaaggtggaatgaaaggtggaatgaagacacatccaccttaaggctttaaaagaccatgaagctgggtgcagtggctcactcctgtaatcctaggatttggggaagccaaggcaggaggattgcttgagcctaggagtttgagaccagcctgggcagcatagcaagaccccatctctataaaaggaaaaaaatgttaaaacacagtgaaactgcagaaacagaacatagccaccctttttcattaatgaccttttcttcacgtggtggtcaactcagcaggtgagaataattagtaggttcagtagaataaagtctttacaattaataacttagtggaaaatgatgttcagatgatgaaatgtggaaatgttttagacagctgtattttcagcctgtgtgtctcagtcaccatcctgttgggattaacagttgagggccatcattttctaaacatttcacatgcagtttcccataatttttaccgtgaatgtgaaaaggtgaaactggtgctgacttcagcggcaggtatactaaaattagaatgacacagaggagattagcatggccccctgtgcaaggaagatccagattcatgccgcattccatatttttttttaaaaaaggttacactgtgcaccgagatgtgcagctagaaggaagagcatgaagtctcgtgtttgctgactataaaaataaatcatagtaataatattgttgaaaattctgctttaaaaattattaataaaaccataaatgaaacactattcttgagcacactttaaaaagtacatagacccataagtccatgtactaaaaaatgcctatttttaggttgcctgttttgtaatccaggatttcatactgagatgaaaattagcatcaggaaaagcctgaaatgccttgccttaattgtgaacagatactggggaacctgccccgatattcacgtaggttcttttctgttttccttaagcatcggccagcttgagaaataaagggacagagtacaaaagagagaaattttaaagctgagcgtccgggggagacatcacatgtcggtaggttccgtgatgccccacaagccacaaaaaccagcaagtttttattagggattttcaaaaggggagggagtgtgcgaataggtgtgggtcacagacatcaagtacttcagaaggtaatagaatatcacaaggcaagtggaggcagggtgagatcacaggaccacaggaccgaggcgaaattaaaattgctaatgaagtttcgggcaccattgtcattgataacatcttatcaggagacagggtttttgagatcaaccggtctgaccaaaatttattaggcgggaatttcctcttcctaataagcctgggagcgctatgggagactgaggtctatttcacccctgcagtcttgaccataagagatgaccacgcccaggggggccagttcagagacccacccccaggcgcacattctctttctcagggatgttccttgctgagaaaaataattcagcgatatttctcccatttgcttttgaaagaagagaaatatggctctgttccgcctggctcaccggcagtcagagtttaaggctatctctcttattccctgaacaattgctgttatcctgttcttttttcaaggtacccagatttcatactgctcaaacacacatgctgtacaatttgtgcagttaatgcaattattacagggtcctgaggtgacatacatcttcgtcagctgacaggattaagagattaaagacaggcataggaaatcacaagagtattgattggggaagtgataagtgtccatgaaatctttacaatttatgtttagagattgcagtaaagacaggcataagaaattacaaaagtattaatttggggaactaataaacgtccatgaaatcttcacaatccacgttcttctgccatggcttcagccggtccctccgtttggggtccctgacttcccgcaacaaacagatatgcatgaaaatgaaatatgcaaagcacattgatgaccttgttctttacggacattgtaatcagcctctagccatacagaacaaatgagaaattagaagcacttccaagaacgtgtgatggtgtgaaacccacttttgaccatcatgcacatttcaacatttgaagtgagacaggctacctggtaactgccccatggcggggtcatagtttaaatggcccaatgtcctgtagaggttaatttaatcaaaatgagctataaacatagaacaatcactatgtataattttaaaatagtttacctggcccgtcatggtggctcacgcctgtgatcccagcactttgggaggccgaggtgggcagatcacccacggttgggagttcgagaccagcctggcccgcatggcgaaacccccatctctactaaaactacaaaaattaggcatgctggtgggtgcctgtggccccagctgctcaggaggctgaggcaggagaatcgcttggattcgggaggcggaggctgcaatgagccaggattgtgcctctgcactctagcctgggtgacagggcaagactccatctcaaaaaataaaaataaaaatagtttatctgggtgggcattccaaaatttccgcatagatgatcacgtgaaacaatcactgtgctaaatgtggaggaaaattcatcacgataatcacaaaatttgtatcagaaaaaaattacaaatgtactttgtttcatgtaattttatgagttggaagtattttcttaaattggaacactataagataatatctttaggaaatggatatgccacaataggaagtatagtggggcaagtcttgtttttctcaagggaaaagccaccagcctgctttcataggcattgataaaaccaggaagaaaataaagtcacaaccaaatagtatacactgtctctactgaattcttctaattccttcccaacagaagtctaaatcctgcttagcctaaacatatctatagccagcgatgggcaaattatatttgctgtcagcatgatagaataagaatcagaaaccccccagcagtggggtaagatcgtgcacttcatcccctcaaaatgctgtcaaccccattccctctccatgccctcaaacaactgcacagtcacttgttagtgaatttctcgttcagcgttttgtttttttctctccatacttaaagaccaaatcatttgtttgctctgaagaaaaagaaaaaacaaaacaaaacaaaaaaccacccaccaaatcatttgaaatcactacccgttaaaaaaaatcaccagtggaactaaacagttgagtggtttgggatgtgttcgccatttctgtgtttgacctacatggcctctagttctttggaccactgtaactgtgaaaccatggcttaatactgttaaagaccccaaggctcaactctgtagccagggtgtacctcaggctgcacaaatatcacaccagaatgtcacaatcattcattgctccagctactgagtgaacagggtgcaagacagcactggcttgggttgtatttttgcagccagttaactttgcatcaggtctacacagtccttgcagcctttgatttctccagttgtagagatttgaaatggggtgcccgggttcctctcgtttttccttcaacctacctagcatgcattttacacacattggaggagtcttatgcactgtttttctctgttgctgatggaggcaagaaggccttctaattagtctaacttaaacggacgggattcacctaacaaaagcaagaagaaaagcacaagaacaggtgtcttaatgcatttggataatttatttggggtgtgtgcgtgtgtgtgtgtgtcttggtggaggtgggggccgtgttctcaccaagccttttcataatcaagtttgctttgcaaactttatggccttacacccagcagaacagtccttgctaataaaaggaggatgccctgtcacagttctctgtaaattatcatgtgttgggaagttctgttgatgcttagtttgatcttccatggtggacacatctgttctgtatgtacaaggcattacatgtgtgttttagcggatgggaattgaagcctttccacagtccttgtgctctgagatggctgttgagctctgctcagctgtcgtagctgaattctttttttgtgctgaacactgggcagcctcaccatgttgtcaatgtgcttctggggcccctgtgactgctgccagatgccatgcacacaagcagagtgcctttgcaggtttgtgcaccccttggcgagctggaactgggagccctgtggggtgatctcgccttctcatggggggtcggggaggggagtgcctatttttaatcttgtctgtttgttgcaccatggaaatcactgtgatttgtatatatgccctaggaaatttttactgcagtctaatttatgtaataatgttgattccaggtttgtttaataaagctttgtatcttttaagaaaaaaaaaactgtagcatgtagaggaaagtgcactgggataatccaaggccaggctttgaggttccaccgctacattatgtgactcttagtctaaaccttttggtgtaatttctttggtctgattatttataagtagcagataataaatgaattttatactacaaacacaagtgacaa

SEQ ID NO: 812 - DNA, 4068 bp, Homo Sapiens
acggagctccagccagggccgcggttcgcctgcacgtcacggctactcaaacccaagcacgtcccgaaagcggtattttctgcgtctgggaggtttttgcatcctcagttcccaccgctggggctggcggcgaccaactcgcagacctgtcgcagccagagagctgtcatttcagtaccgggattcagaattgatccagtccgcagcggagggggcacatcccagctaccgagctgctgagtgtctctggctggaacaatagtatttttttctctgcgaggctgcaattaacatcttatttgttctggctccatacaggctttgtcaggatcgcggtgcggcgaccgacgttgggctcttgcattgctttgtgcttggcaatggaatcatggtttcggggtctaaacttttgtttcgttttgtagtcttaatgtatctgattctttttcaagtttccctagtaacaggtttggggacggggtgggaagaagcgagaaaaggggtgaagagaaaaaaccagattatatagaaaggaaaaagggaaaagggatgtttccccaccttttaatctaactatctatctgtctgtctatctatcatcatagatagtcattttgcctcctggacagttggctgacgaagtgtctgataaaccagcttcagatacatgctacaaaaggctactgagctggcctgatgatgatccttctgagatatatttatagcagatgatttgtggatgataactacgccaagcaagacactgtctccagtaaccccaggctcgtctgacttcctcaggggattataataaagaatcacaaaaagaaccctatatggacagtctggtctctggacactaacaacagcacaatccaaaggcaaagaaaggaggaaccaccttgtttcatgtctgcaagctgctccatatgaaagcattgctgacatgttgacccaacagcaaaaagagagcagcagtttacacaccctcagctctctgtcctttcctttctattgatgttggtccacttttatgactgaatacatattaaaatcaccatttcaaattataattatctgctttcattggtctctttcacaagtctatgtctatatttatgtttacatatataaacacatatacacatattttatacatacatatgtatatgtatgcacgcattatttgtaagtacacatacacgtgtgtgtatatatatgtatatgatatgtatatgtgtatttcagttgatacacatatatttgcttgggaagtttcactacattgctttgtatttctcttttataaggtaatgcatttaattccaaaactaccacattaattgtataaattgattattacataagtttccttgatgatttacagaagaactattgagaggtcagtgttagcacatcaaaatatagtctggtatggcattttaaattgacccaggtatctaatattaaagcctttcaaatttatctctcctgctattattttattaagattactttggaatgatgaggttataagtgtgatttatttctgtttcatctttttgtctgtatgtgctaagtttagtccctccactttgagaataaccctataatccaggatcattgcttaaaattcagtatcatttgcagaattctcatactcaaataagaatgtttctagaatatgtttactcaattttagaaagtattttctctttccttctttctgtcatagtttttctgatattactgtattaccacattctaaactctgtgacttgttattttcagtaaggctttaagaagcatggataggtttgtaggttatttcttgttaaatatgccttaattttttagtatttagtattagtatttagtttttagtatttagtatttagtatctcccatatatatatatgcacacatatatatatacacatatatatgtacacacatacatatatacacacacatatatatacacacacatacacaaagctttggaatgttaattaaatgatcaaaatattacaagattacattgttatgagaacttatccttaatattagcatatttactataaagttaaacaacttcttctcctctgtctcctgtttattatcattattttattattattaaaaaaggaagtctctcagaaaccaagctgtatatcctctagtctctatgtaaaaaaacaaattggtcattttctacttggacatcccagaatagaaagtacattgaagtactaaaaaataaagggatagacttggggttaagggagatgtcatagaacagctatcctgggttagttcaagtgtagtcctattccatgctaggcaaagtcaaggttacaaaaatcccagttgcatcaggtttccattttttatcattatttccctatacaacgatacaagttaaaaaaaagtcggtaaatacttttggccatcaattttcaagatttcattggtgatattaaggaaatgctgtaagtaggtaacacataatgtcatatttgtgtgctgtagaagtatcttggaaaatatggactttaaaacctcaaaatatgggtttgcaatcgaacatacattcacccccaaatttgacctttttcagctagttattttctcatataaagttactatacttacaccattatctttaatccctgaaatttcaattatactagaaatcaagattcttcatttttactcacgaaactgacactaagtatatacctcattaaggacaagaagctatgaattctctggacttcagttatctcacagaaaagagcttgattgaataatgtctaaggctcttcctgacatagtctaaataacagaaggtgtctcacaagaaatggaagcagtgagagaaaaatgcaattaaatcctagactagaaagaatcacaattttcccactcacaggttggaaatgcctctctattctatcacaattttgaaaacctccatagttttactagctttgcctttctcccttgctatcatcttctgaggtacagacagtcctttccatttttattcctctcccactctgataatttttttctttgacagaagtcccactttatcattaatgatgacaataactaaggctgccaggaacagcacatctgctgagctttatcaacaccagattctctcattttgccttctggatctccatgcttttttataccaacaaacaagaggaagaatattctctacccacttccttgactgaagcctgctcttttatgaagacatggcatctcttccaaccgtgtcaaacagatgcaatttatatgtctgctgcttccataccctgattaaatgggtcagtggcagaatcaagcatttgtttgccagtaagccaggtgccatgttgtcatacagccctaaatagagaagtccatgtgagtttggccttctgaggcctgtcaaaagacacatgagtgagctcagaagtggaagcttcctcattcaagtcttgagaggactgcagcccagccaacatcctggttgccactacatgacaggcttgagccagaatcaagcagctaagctgcttctggattcctgacctacagacactataaatcaggaatgtttggcttccaactgctaaatttggggataatttgttatgcaaatataggtaactaatgtatatcccatggattccacgcccattgttataataatttacttacaacagtcttcagctatttaacatttttctggctggatcaccacgtttactgtgatgaacaactgcccttcctgatccaggacccatgcagcagagcattactgaagaaattcacaccctcaggcagttagatgtccctgtaaagttatagtcaccaggttctcatgatctcaccacacagactgttacttataagctccctctcttattacaccctatgaatattttgtaacttttctctgattattaaaaatgcttctcctcaactcttgaatgataagtgataaccttttttcattcattatttataaaacagatgtgattagatggaaaatatcttatattcatt

SEQ ID NO: 813 - DNA, 297 bp, Homo Sapiens
gccgggcgcggtggcgcgtgcctgtagtcccagctactcgggaggctgaggctggaggatcgcttgagtccaggagttctgggctgtagtgcgctatgccgatcgggtgtccgcactaagttcggcatcaatatggtgacctcccgggagcgggggaccaccaggttgcctaaggaggggtgaaccggcccaggtcggaaacggagcaggtcaaaactcccgtgctgatcagtagtgggatcgcgcctgtgaatagccactgcactccagcctgggcaacatagcgagaccccgtct

SEQ ID NO: 814 - DNA, 299 bp, Homo Sapiens
ccgccgggcgcggtggcgcgtgcctgtagtcccagctactcgggaggctgaggctggaggatcgcttgagtccaggagttctgggctgtagtgcgctatgccgatcgggtgtccgcactaagttcggcatcaatatggtgacctcccgggagcgggggaccaccaggttgcctaaggaggggtgaaccggcccaggtcggaaacggagcaggtcaaaactcccgtgctgatcagtagtgggatcgcgcctgtgaatagccactgcactccagcctgggcaacatagcgagaccccgtct

SEQ ID NO: 815 - DNA, 2638 bp, Homo Sapiens
tcccttgcaccaaaaacagaaaggaaggcctatgaaaatcagaccatgaagtcttatttttcattctttggtctagtaatttaatttcattttccagattattaatgctgcagtttattatatatttgatgctgaattgctgaatttgacttgtccaaatgacatcaatcctgcctttatctcattgccagaagtagtgaatatattgctttttatcctggtgaaagggaagattcaaagttgtttgaaggagaggggctgatctgtgtggtggcagtagaacatattctgattgatgtcctctaaccttgcaaacttgccagagcatccacctagttcaaccctagttcagttatcatggtggaaacccattatgggcactcttagcaactattgtgcctatatattaataagtctactgaataacaattagttcatccccttacttcttcagcccttacttccacattgaaagaagtaaaaagtagaactcaccaattgctatttaagcacatttgctagttttgtaaagtctatagacttctaagaggaatatatgaaacctcaagtaaatatattaaaacatgcacaaaataaatatatttatgatatatactttttattgtaactatcaaattttaatcaaaaaatttgtaatgctagggaaatctcaggttttactaatggaattatgaaaaaatattaatcttaatacaatttgtaaaatgccttaaaagttagatgttgaaatggacttccaggtcctgtagctacttctattgaaattatcatcataatgttttacaaaatgagaaaagtaatacagtttctctttccagttgccctgaagcagactaactgatgcttgtaaagatgtttctcagcataaatggattgttagagaatgaacttcagttaattttgaccttaaaaaaaagtcacgtagatatgtattttcatctgaaacattttcaagagtcttgcaaacaagtcactctaaaataatttatgacaatgtttatgtgctcaattacattttggtttttcaatacatattcttaccttaagtgaaagtagattgtatccctggttttcatttttcagcacattttcaagttttctaagagaagtacaaaatcataatctgtcactacataacatgtcactacatgttcaacatttgtaaaactcaatttattataaatcctgagttattagtaactgttatttgaaagccattttagtaatcatagaaagcactaatattaaggagtaaaaaatcaacaattaatatcagaaataaaccatgagctcttagaaactagtgggataccattaggcattcataagatataataattcaaaagtaaaaattatatgctttgtagctcaaaagtgctttcacctattttctcatttgtgtagccttgaaatagtggtagatgagtatttcaaattcaagcatcagatatttcataaatactgcatatgcctgtgtgtggaattattgatgttttgaacctataaacaggatagaaaggaagagatggtcaggaaacaatactggagaagaaaaagaggtaaatggtaaaagcagaaaaaatgattagattatgtttattttagaatagattcatttagtgaatatgaattgaggaacctacttaatgccaggcactatttgcagctctggatgtacagcaatgaacaaaacttttaagtcatgcccacaagataaagtgaccaactcatctcagtttgcacagatgttcctggttttagtactgaaagccctgcattccagaaaccccttagtcgagggcaaatcaagacggttgctcaccattatcagaacctcactttctggtaactgtcatcttgatttccaaattcatattaatatttttatctcattgttaatgacaatgcaagttagcactgaccacaagtaaccaatggctagtatacctgtttctaactggggcaaagttatgacaagagcaaattatagtaatatcaaacttcctagaattatttctagacaacactccttggagtgcaactgaagtatcaaaagtacaacttgccctcaaggaagagttagtgtctgggaatgtgaacgaacaatcataaccaccatttgcaagacacctacgtatatcatctctagttcttacaaagccctctaaggtagtatcatcatctccgttgcaaggataaagactttgagagtaaactctcccatacacaataatgagaaagaaaacccaaggtaaaagaagagaattggagctttcagatggctatagcaagtcttgtataagcaatagcatttatttttcagaacagaaaactattaatgctctcagtgtattttacttcttgtgttctattggattatattttcctggaaactggcttctctttggggtcacattttggtaatcaatgttagtcttattcttgttcagtcaagtttactaatgaaatggataggacagtacctttgaagcactgacttggttaatgtggcaatgtttgaactatttttatattgactattattgaatttcgtagaggaacttcaaattgaagacgttatggatcagccagcattcaaagatgaaaataaatcaat

SEQ ID NO: 816 - DNA, 1353 bp, Homo Sapiens
aataattgcaaatatatttattacaatttacagattagttatgttatatacacaaatataattttaactataaaatcccaactagttacatttaaattattgatctgtagaagccaatttagagtcttctagtcccctaactttaccttccttaaattatacaaaaataaaatctgatagttttgatttcaagttaaagatgaagaagtgttacatttcatcactcagaaatggaacttttacctgtctgtacaaagccttttacatgctacattgacacttaaagcaccattaacaagactttaaatgtataaaatgtttaattaaaacctccaaagattttctctttaagattacgggggtttaactttgttctaactagaattgggatgaaacaagaattttgcttttttctccttcagtccaactttaaaatagtcctttctgtccttcttatcaccttctgatcacttcttccaaggaggctagtatatggaagaactcttaatcaagctttcactcatttggtagtgaggttagaatcccatggggaacaattttccaaaatccaatgaaagatgtctcattattttcaaatacacagaggtgctaggtttaagaaacaggaaacacaacgttaagtctcggaaataaaatgtttcagcctggttttaaaagaatgcctgtatgttgtcaaaaggcttttttcaaggcaaatgacgcctgctttccaaccgacattgctgttgcttgaaactagcctgttttcatgttattagaccatcctgtaaatgtgctccctatgattacctaaagtggaggtgcacaaaacacacagaatcccagcactttgagaggccgaggcgggcggatcacgaggtcagcagttcaagaccagtctggccaacatagcgaaaccccgtctctactaaaaagacacaaaaaattagccgggcgtggtggtgtgtgcctgtaatcccagctactcgggaggctgaggcaggagaatcgcgtgaacccaggaggcggaggttgcagtgagccgagatcgcgccactgcactccaagctgggggaccgaacgagactctgtctcaaaaaaaaaagaaaaaaacaaaaaacacacagaataagggctctgcaaaaatttgaccagcttttatagtgttgcattctcaatgtgtttaattatgaatatataaacagtggaggcagttcttagaactggatagaaataaaataatgaccaggtagattgtaaactgaggtagtaaccctgtaagcacttctgatgaaaaattcatccccacacttaaataagttcaaaactaagaggtcacctattctacttatg

SEQ ID NO: 817 - DNA, 2284 bp, Homo Sapiens
gctattggctaaggagggcttatcggctgggaccccttgtatgcggaaggccggggacagggagctaggcggaggctgtggtcgaggccggagagcgccctgcggggggcctgcggagacggcgcccgcattttcccagctctgggtgcgatcgactgctcctgccggtccagcagcgcccgaggcggcccctgccttggccccaggttctcccacttgccccggtctctccctccccagactgggcgccgctgcagtggtctcagctgcgtgaaattccttcaagccccctcttcccgcctccacccacgctgccttccagctattcattcacgagaatttcttgaatgcccacactaggcgctgagctgataaactggggtccgtggcctggaaccctgctgagtgtccctggcggccttgccacagggtgcaaatcgcgttgaagagtggaccaagggctacttgaaaaggcggttgcggagaaagaaaatagctttgataataagaattagtagtttaggcaagtctttgagcctatcaagtaattcatcaagaggagaagataagttattttgagaagcgaagccagaaaaataacacaggtccttgacgctggtgttcgtcctcggataatagggctgctttggagacaggcaacagtagactggtagaatcgttctattgcttaaggctttgatggtggaagagaaaaaacactcttgttgaagtggcatatccaagaacagtgctttctttctggtttaggatggagaaggaactgactgctgtacccaagtgaagatctttactcagttacccttatatttggctatatggaataaaattgtgtgatatgtttattctgagcaggtacaaaacttcagcaaacctattggtcccacattttcccccccatttatcatatgatttggagtgaccggttgacctttgagttaatgaataatttaaagcagtgaaaaattttttgcagtaaactacggtgttttaaccttgataacataagcatagtggttaagattctaggctttgtatctgaacatacccagagtcacatccatttacatctttgattttgggcaagttatttaatctctctgcctcagttctcttgtctctaaattggggataaaaatgttttcctgataacagtacctttacgtgtaatggttcatgtatcgtatttattacagtgcctgttttatggtaaatattcaatacatattagctgtttttataattaattcctcccactacatcatgatccaaactgactcttttcttaagtgatggggaagggaactgaatattttaaggaagtagctataaaatatgatttcaagttgttctgtagtaattttggtgttccataaggacattttaatgtgaaaaagatactgacagaatctatacatggtttgaatttattagtttctaaactatgaccagtattagcagatttaaaattcataattatagcaagaaaacgtcaaagttgtttaacagtgttaaaatttgaaactgtaatgatccagaaaaatgaaataccaaaccgataattttgggaaaaaaacaaaacttgagtggcattatgcaggccatttactttttaaatgtactcaatataaacaggaatcccttctctccaaatttcagtttttcagaatttgggctgtcatttgaaacacttactttgggcactttgactgttaaagaagcaaagggtatgctaagaacttcaatgagtcttgatgttagtgtttttgtaattaggtggaatctcctaccttttcatgaaaactgggtttaaagcagtagctgctgggtccattctaatgataatctcaaaaatgtgactgacttgtaaaaatctacaattatttattaatgtgagactaggtaaagtatgagttgaaaaactaggaagaaaggcagagtggtgatttttaagcttgtataaaggaaggcccgctttgggtactatgaggtacctttctcactcagaggcatgctgtgaggatttgtgacttttaaatcatttagctctttttataactttgtggaattaaatctaccacgtatttcaagtgtattcaggatatgaattttcctggtagagagttttaacagatttttttctcttaacccttcattgatgaccaaacaattttgttgtctgtaataagaaagtactcggttttgtagggtgtcagtccttaagaaaatgttaggtagtcatcaataaaatagcaacaatctctgg

SEQ ID NO: 818 - DNA, 1707 bp, Homo Sapiens
gcaacctccacctcccgggctcaagcaattctcatgccccagcctcctgagtagctgggattacaggcgcccaccaccacgcctggctaattttttttgttttgtattgtttttttttttttttagtagagatgagatttcaccatgttggccaggctggtcttcaacttctgatcttagctgatccacctgcctcagcctcccaaagtgctgggattatacgcctgagccaccgcacccagcctcaaatcataaacttttttttgttttttgagacgaagtctcactctgttgcccaggctggagtgaagtgacacaatcttggctcactgcaagctccgcctcccaggttcaagcgattctcctgcctcagcctccccagtagctgggattacaggtgtgcgccactgcgcctggctaattttttgtatttccagtagagatggggtttcaccatgttggccaggctggtcttgaattcctgacctcaggtcatccacccacctcggcctcccaaagtgctgggattacagacatgagccactgtgctcagcctcaaatcataaactttttaaaggtttatccctgaccctctaaattaggttatgtgccttgttatatgctcttttagcacttatcctaattgtgattgtgtatttattatatgattgtttattcaacagtttctttcaacaaatatttaccaagtgtttagtaaatcttgttttggattgtaagcttcattaaggcagagtaaggactgggtctgtggtttctcttaccatgtgtacctagcacctagcacagtgcttagacatagggagtacttaataaatagtcattgaatgtatacattaaaatggcgttaataatgctgcctatctgatgaggctgttgtgagccttcaatgaaatcgtgtgtaggaagtgctagtttgctcacaggctggtggtaacagtctactgtggtcattgagagcagttattgtggacacaacccccagttctggtcaccccacccactagctctgtgaactcacataggtacttaatatctctgatttttattttatttatttgtaaaatggaactaataattacaaccaccttataggacagagtcttgctctgtcacccaggctggagtgcagtggtgtgatctcatctcactgcaacctccgcctcccaggctgaggcaggagaatggcatgaacccgggaggcagagcttgcagtgagcccagatcgtgctactgtactccagcctgggtgacagagcaagactacatctcaaaagaaaaaaaaaaaaaagtattattgagaatataatataattaacctgaataggttaattatattgtggaacctaaaccgtataaatttaaaatgccttagaatgcccagtcagcaagtgacagtattagaaatcaacctggattttagaccgctgtgtgttcatggataatgtttgtgtgtttaggagactattctgaatagtggttcacagtcctttacatgcatcccctgtgcattggatgcttcactagccttttctgactaaagcatatgaaaatacaagtgaaaaaggcaagttattacaggaataacttttcattttctctaattttcatattttaaaaattcatttgtaagcatttgatactttaaacctgtttacaggaacttggtataaaccaccatgtccagcc

SEQ ID NO: 819 - DNA, 2023 bp, Homo Sapiens
aagagtcacacatctctcacgttaaatcaaaagttagaaatgattgagcttagtgacaaaggcatgttgaaggccaaaacagaccaaaatctacgtttcttatgccaaacagttagccaagttgtgaatgcaaaggaaaagttcttgaaggaaattaaaaaggctacttcagtgaacacaggagtgataagaaagagaaacagccttgctgttgatgtggagaaagtttgagtggtctggatagaagatcaaatcacccacagcattccctaagccaagtcctaatccagaccaaggcagttactccgttcaattcagtgaaggctgagagaaatgaggaagctacagaagaaaagtttgcagccagcagagtttggttcttaagatctaaggaaagaagtaatgtccagaacagaaaagtgcaaggtgatgcagcaactggtaaggtagaagcttcagcaagttattcaggtatagctaagataattcatgaaggtgaacgaaggtggctacactaaacaacatattttcaatgtagaccaaacatccttctattggaggaaaatgccatctaggaatttaatagctaaagatgaaaaatcaatgcctgtttaaatcttcaaagaacagtctgactctctttttaggagctaatgtagctggtgactttaagttgaagccaatgttcattgactatcctgaaaattctaaggtccttattctcagcaaactatcgcaaggacaaaaaaccaaacaccacatgttctcactcataattgggaactgaacaatgaaacacatggacacaggaaggggaacatcacacaccagggactgttgtggtgggggcggggagggatagcattaggagatgtacctaatgctaaatgacgagttaatgggtgcagcacaccaacatggcacatgtatgcatatgtaacaaacctgcacgttgcgcacatgtaccctaaaacttaaagtataataaaaaaaaggaaataagctcaatctactctgcctgtgctctataaataaaataacaaagcttggatgtcagcacatttgtttacaacatagtttaccaaatactttaagcccactcttgagacctactgctcagaaaaaaagatttctttcaaaatatcactgctcattgacaatgcaccaagtcactcacataagagctctgatgaagatgtacaaggagattaatttaatgctgttttcatgactgctaacacagcatccattctgcagcccatgcttcaaagagtattttcaactttcaagtgttatgatttaagaaatatatttttatatatttatgaagtatagctgccatagatggtgattcctctgataaatctgggcaaaataaattgtaaacctaggattcaccatcctagatgtcattaagaacactgttgattgatgggaggaggtcaaaatataaacattaaaagaaatttggaagaagttgattctaaccaccatggatgaccttgccggattcaagaattcaatggaagaagtaactgcagatgtgttggaaataataaaagaactagaattagaagtggcgcctcaagaagtgactacattgctgcaatctcatgacaaaagttgaatgaatgagaagttgcttatagataagtgaagtggtttcttgagatggaatctacacctgataaagatgctatgaatattgttgaactggcaacaaaagatttggactattacataaacttatttaatgaagcagaagcagaggcagtgtttaagaagactgacttcatttagaagttctaccatgtgtaaaatgccatgaaatagcatcataagctacagatacatttttctgaaggaagagtaaattgatgtggccaacttccttgttgtcctattctaacaaattgccacagtcaccccaacttacagcaaccacccttctggtcagacagcagtcatcaacatcaaagcaagacctcccaccagcaaaaagtatcactagttgaaggctcag

SEQ ID NO: 820 - DNA, 1527 bp, Homo Sapiens
acatataaatgattctaaggccttctgacctgtctttcaataggatggtattacccaacaattatgacgtctacacatacttttcattttcaatcacattgggacaaatttttatctttatctcatttctgctttctcctgtatgtataagtgctgatattttactgctctctacaaagagtaaagtctattatggtcttacaacttaaatttgattccaagacaaaggttaattggtaaagattatttcccaagcgttaatattgtacatgaatcagaaggtcagatggcatttctggatctgacagctcttatcataatgaaggtttgaaagaaatgtcatcttgcgtactaattaatggttttagccctagtgagagatcttttatttaacgccagtaagttaatcgcagttgatgtctgtgaactgtcaactctcaagctatgcatctatttgaggtcattgctgacaaaacccctattttacaggcaagatcactgaatatacatcacttgccaatgtatcatagacatttgaaaacttatagaattcagcaaatattgttcattttatttactcattttttaatagtaattacaaactatgaatggaaaaagctataatttaatcattggactacatacattcaatttttaaaaaagactctgctaaatagaaaagtgtttgaagtatttatttttccctaagtaaaaaagtaattttgtgagacagtcacaattataatcctgatttctaaaatttattaatttgagatcttcattagaagaattgagacattttttcttctgaaaacaagacacatacacaaatatatatatatatatgaaaaacttccaatatttaagaagtatttcctctgaacattcttagttacaaatgctattttaaatttttaatatttgctactgataatctgagagtgtcacatttattatcctgtttcagccgtaagtgaataagtgttactgcattttagcagaactttatttacgaaaacaggctagatttggccaaggttcatagtttcctgaccacagttcttaaacatagcaaaaggtatacaaggtaaactcacattttctagatgaccaatcacccaggtttccaggacaaggaaatgtttgttagtttaagaagcagggcaatcctagacaaactggattagttggttactttactttttcctagattctaatatcatttgttcattcaataattcatttaacactgagggtctatcaacattcaacaaacgcaaagtttcaaattaaaacaaaagcacttacatgttctgccattatcagacaattatatgacatgttattttgcagccaattgtaaaaggcatttttttactttattattaattttaaatttagacataccttaaaatggacatactatagtaaacatcaacataaaacaagataatggaatattattcaaataaaaagatacaatatagcaatataaacttttttgaatttatgtcctatagaagttct

SEQ ID NO: 821 - DNA, 2409 bp, Homo Sapiens
ttgtcaattatattgacaaggtttgggtgtgtatgtcatatttaaattataagggaaacagtgattatatatttgtcttaaattatagtacttaggaaacagagtgaagaaaaaggaaaaaaaaaaaaaaaacctaagtggcagggaccctctgtttttgaaaacatatttgtatattcaatatgccaaaatatctaatattaaagtgatatactaataaatatatttggcatattattatggtactttcagttctcaaacttttaaagtaaaaatattgatcaagattaatgttcccaatgcaaagaaataataaatgtttgaggtgatggacatcccaattaccctgatttgatcattatatattatatgcttgtatcaaaacatcacatgtaccccataaatatgtacaacaactatgtacctataaatattgaaaataaataattttttaaaaagaaaattctgaatttgagattttaaaatcaaattcaaggtataatactggtcaaaaattgtgaaccaaatatgttattttagtttttttattgctgtggtaacaaattaaaacaaacttagccacttaaaataacacccatttattatcttccagtttttatgattccaaagtgttggctcagcatggctctactgaattctctgcttagggcccacgaggctgaaatcaagttgtcacctaggctttgtgttttactagaggctagaggaaagaattggctttaatgcttattgaacttggaggcagaattcatattcttctcacgttttcaagacagccaatgggcaaaagtactcatacttcaaatctctttgttctctgctgaatctgtctacatttaaagactcatgatattacattgagcccacctggataatccaggataacctccctattttagaacaatcttcactgcctctgcaattttttttttttttttgccatgtaatataacatagccatagggatgacaccaaggggtgaatgagggttatggggctcaaaattctgtctaccacatatgatggagctcttcattttcctctcacattatgagattctctattaagtgttcagtttaattattcttttagatattaaattttaaaggtaagaccaaattaactttttaatataaatgataaaagtttacaaatatccaactatctgttacccaaaaattaatctttcagagtaaaaagaatttagttatggaaataataaattgaaaagttacctttcgccagtgtctttgtttctggtttttcttttttctcaattttttccttgtgagttgcttaaacagaaaattttacattagtacacatttttaatagatttcaaaaccaagctttcttttgacctcagtttcataagtgctaaaacctaatctgtaatattttgaaaatgtatgacattaataagtctaattcagaaataaagagttaccagtgtaataacagttgtattgaattcaatgttaaagtctaggcattaagacttagcaagcttgttgaaaatcagatctactctttctcaagtcattatttcaaacaggtaaagctttcagggaagacaaactgaaagggaaaattttctataagaatttgtcaaaaaatatgtcattatgtgtatttttaaatttgaattatattaaattgtgttgtttggtagtttcccaaatcatcatacatttttcaatatttacatactattttttcaagaataacaatggtaattaaactacgaaaattaagtagtaaaatatgagatttaattgggcagttaacaaagtgtatgcactgatttgttagaggaaaaaattagttccacatatttccatttctcctacttccaacaagaatagtaataatgtacatcagctttacttacatcattaagaaatgcttaaaatatgtatttaaaaatccattatttttaaatacagttgataaacagtgtcctccagaatcttggagagatgatttaagcctcagaaagcctaatattcagttgaagagcaagtgtccctaacacatgcagagctgctgagagaccaggtgcctcctcctccagagtttcagcctctccaccactcaggcctgcccacaggtacctccactaccacttgggattatgggtaatagattagacaatgttaacaaaaggagcattatgctaggctaagcaaggcactattcaaacaaggtcacaggactacattataataacatatctcctaaaaagcaaacatcctttaattggcataaggtaaataaaagagcacttacaatgcagcattttatttctgcttttcaatttgaatacatttttttctgcagcacttataatttaagggcaaaaattcctaactttttttttaacagaaa

SEQ ID NO: 822 - DNA, 11890 bp, Homo Sapiens
ggatcacctgaggtcaggagttcgagaccagcctggtcaacatggtgaaaccctgtctgtactaacaatactaaaatcagaggttgcttgcagtgagccaagatcataccattgcactccagcctgggcaacagagcgagactctgtctcaaaaaaaaaaaaaaagaaaaaaaggaatttacatagttgaacaactattctttggacatcttttagtccagtagacggtgttaaacttgaagacaaataacgatttgacctgtgatatttgtttttccctcttatcttctaagcccattcatccagatcattcatcacctttaaaggcatccccaaagggaggcaggtctggacagagctgaagattgcacaggccatttgcaggctggattcgttctctggtgacccacctgtctgactcgaattatttttttcccatgtctggacaagactgacctctgcccagcaactgaggcctggatttagtccaagggccctcagtggcttttttgtttgtttgttttttcaggaagtgaagaatttagagggataaaaggcggaaataacttttcagcctctgacctttgtaacaatctggtttccttttaaaggagcattgtttgggcctggggccacctagaccttctgatgctctttccccacccttggaggaggaggaaaggaagaaaatgggccctgagcgatcaccacataccaggccctgggggtctagtggcgaaggaggcaggtagggtctcttgctttcatggagcttctagtcaagcgagacgcactaaacagtaaagggacaaataggattactggaggtagccctaactactgggacagaaacaagatggtaagatagagaaggaagagtggcctgctcagatggggtggtccagaggcctctcgggggaggtgactcctttttgttttattttttttgagatggaatctagctctgtcgcccagcctgaagtgcggtcgtgtgtttcatgcgcgtccgtgtgaagagaccactaaacaggctttgtgtgagcaacatggctgtttatttcacctgggtgcaggcgggctgagtccgaaaagagagtcagcaaagggtggtggattatcattagttcttacaggttttgggatagggggtgaagagccatgtttgcaggcaggggtggatctcacaaagtacattctcaagggtggggagaattacaaagaaccttcttaagggttggggagattacaaagtaccttcttaagggtgggggagattacaaagtacattgaacagttagggtggggcagaaacaaatcacaatggtggaatgtcatcagttaaggctatttttacttcttgtgtggatcttcagttacttcaggccatctggatgtatacgtgcaagtcacaggggatgcaatggcttggcttgggctcagaggcctgacagtgtgatcttggctcactgcaaactctgcctcctgggttcaagcaatttttgtgcctcagcttcccgagtagctgggattacaggtgcccgccaccatgcccagctaatttttgtatttttagtagagacatagagtttcaccagattggccaggctggtctcgaactcctgtctcacgtgtctgtgtgaagagaccaccaaacatgctttgtgtgagcaacatggctgtttatttcacctgggtgcaggcgggctgagtccaaaaaaggagtcagcaaagggtggtgtgattatcactggttcttataggtttggggataggcggtggagttaagagcagtgttttgggggcaggaggtggatctcataaagtacattgtcaagggtgaggagaattacaaagaaacttcttaagggtgggggagatgataaagaaccttcttaagagtggggcagattacaaagtacattgatcagttagggtggggcagaaacaaatgacaatggtggaatgtcttcagttaaggctgttttcacttctgtggatcttcagttgcttcaggccatctggatgtatacgtgcaggtcactgggatatgatggcttagcttggactcagaggcctgacattcctgtcttcttatgttaataagaaaaataaaacaaaatagtggtaaagtgttggggtggcgaaaatttgtgggggtgatatggagagataatgggcgatgtttctcagggctgcttcgagcgggattaggggcggcctgggaacctacagtgggagagattcaactgaagaaagattttggggtaagggctgatactgtggggttgttagaaggagcatttgtcatatagaattattggtgatggcctgaatacggttttgtatgaattgagaaactaaacagaagacacacagtccgaataagagaaggagaaaaacaggtattaaaggactaagaattgggaggacccaggacatccaattaagagagtgcccaagggggttcagcataattatttgcttggttggcaagtttttggactctatccttgagtttttttatgttgtcatataccaggccagattgatttaggtaaaaacaacactcttcatttaaaaatatacagagtcgtcctttttcagcaatgagtaaattgaggccttggcgattttggaggaaagagaattgcaaagccagcaattgtttctttttttatttatttatttacttattttttaaaattatactttaagttatagggtacatgtacacaatgtgcaggtttgttacatatgtatacatgtgccatgttggtgtactgcacccattaactcgtcatttacattaggtgtatctcctactgctatcccttccccctcccccaccacacaagaggccccagtgtgtgatgttccccttcctgtgtccaagtgttctcattgttcaattcgcatctgtgagtgagaacatgcggtgtttggttttttgtccttgtgatagtttgctgagagtgatcgtttccagcttcatccatgtctctacaaaggacatgaactcatccttttttatggctgcatagtactccatggtgtatctgtgccacattttcttaatccagtctatcattgatggacatttgtgttggttccaagtcttcactatcgtgaatattgccgcgataaacatatgtgtgcatgtgtctttatagcagcatgatttataatcctttgggtatgtatccagtaatgggatggctgggtcaaatggtatttctagttctagatccctgaggaatcgccacactgtcttccacaatggttgaaccagtttacagtcctaccaacagtgtaaaagtgttcctatttctccacatcctctccagcacctgttgtttcctgactttttaatgatcgccattctaactggtgtgagatgatatctcattgcggttttgatttgcatttctctgatggccagtgatgatgagcattttttcatgtgtctgttggctgcataaatgtcttcttttgagaagtgtctgttcatatgctttgcccactttttgatggggtttgtttttttttcttgtaaatttgttggtgttctttgtagattctggatattagccttttgtcagataagtagatggcaaaaattttctcccattctctaggttgcctgttcacactgatcctagtttcttttgctgtgcagaagctctttagtttaattagatcccatttgtcagttttggcttctgttgccattgcttttggtgttttagacatgaagtccttgcccatccctatgtcctgaatggtattgcctaggttttcttctagggtttttatggctttaggtctaacatttaagtctttaatccatcttgaattaatttttgtataaggtgtaaggaagggatccagtttcagctttctacatagggctagccagttttcccagcactatttattaagtagggaatcctttctgcatttcttgtttttgtcaggtttgtcaaagatcagatggttgtagatgtgtggtattatttctgagggctctgttctgttccattggtctatatgtctgtttcggtagcagtaccaggctgttttggttactgtagccttgtagtatagtttgaagtcaggtagcatgatgcctccagctttgttcattgggcttaggattgtcttggcaatgtgggctcttttttggttccatatgaacattaaagtagtcttttgcaactctcatcagcccagtttaatattacctatttattataatgtaatgctgctcggacaactgagaaaatactgttgctttaccccctccagctctgtagcagccacgcagaaatcatagaactgtaaacatatgctaattacacaacctatgtaggcaatcaatattaagaaaaatttttactgctcggtatttctgtggttgaaaatgtagagtctaattttgatccgcagtaacatctaggttaatgttgattcagaaggaaaacgtttgttgttgccatgagaagaggcattgaaatgctgaatcaccaccacaaatgttaccactattaatataaggagatacataggaagatggaattagaccatctcggaccaccaggtttacaattccacctgcagatacatgcaagaagtattgtcacaatacttatgtcacgttattccgttgaggtcatcaccaactaagcttataattaatgtgtggtcaatttggtcaatgtcaccagcgtagcatactaacaaaaacaagggttgcaaagtcaaatgcctataaggcagaacgtaagacggtaggaagcaaagtctatagggagctatataatagaggctgcagattcatggcagattctaaagcacagcagtccccaacatttttggcaccagggaccggctttgtggaagacaatttttccacaggcggcaagggatggggcgcaggatggtaatggtcttgggatgaaactgttccaccacaaatcatcaggaattagattctcataaggaatatgcaacctggatccctcgtgtgtgcaattcacaacagggttcatgctcctgtaagaatctaatgatgctgctgatctgacaggaggcagagctcaggcagcaatgcaagcaatggggagcagccagaaatacagacgaagcttcaattgttacccaccattcacctcctgctctgtggcccagttcctaacaggccacagaccagtacatgtccatggcccaggggtcagggaccctgctgtggcacattgcttaatagaggactgtagcagccatgtgccctgacctttcctttttttttttttttttttttttttgagatgccagaaacccagaatttttttttttttttttttttttaagacaaggtctggctctgttgcccaggttggagtgtaggagggcgatctcagctcactgtaacatcaacctcccaggctcaagcaatcctctcacttcagcctcccacgttgctgggattacaggcacactccactacacccagctaatttttttgtattatttgtagacatggggtttcgccatgttgcccaggctagtctggaattcctgaggtcaagctgtctgcccatctcagcctcccaaagtgctgggattgcaggagtgcaccaccacacctggcctgaaacccagattttatttatttatttattcattttttgagatggagtcttgctctattgcctaagcttgagtgcagtggcgcgatcttggctcactgcaacctccacctccctggttcaagcgattctcctgcctcagcctcccaaagtgctgggattacaggcatgcaacaccacacccagcctgaaacccagatttttaatatgaaatcaaagtcttcagaccttgtaggtgtcataaaaagcacgctgaggaccactagtttgcaactgccaatctaaaatatcatagacattatatcactttaaccacgaaaaaaaaagtatgtgaggcagaaaatggaagcaaccatgcctaatttattgttgaatactttttccgtataccaagagcttcctttgcactagcatctgaaactatatccagaatgacactggttttcataaaagtgttgatcctcacacctctttatagtcttgcacctagcccagtggagtgaaacactttaaatagcacttgttccttgagtatatatggaaaaaagtgaagtattgataagtgctcagctaatatgagcagcatctcaggagtctccaattcttgaattaccagggagtatttttaccattttcccccagtgaaaggcctattttgagagacttatcctccaaaatgaatgtattaagtcatgttccttttttttttttttttttgagacagggccttgctctgttgcccaggctggagtgcagtagcatgatagttacaggaaaggggtcccaatctagaccccaagagagggttcttggatcttgtgcaagaaagaattcagggtgatgccacagtgtgaagtgaaagcaagtttattaagaaagtaaaggaggaggggcaccgtggctcactcctgtaatcgcagcactttgggaggccgagacaggtggatcacgaggtcaggagatcaagaccatcctggttaacacggtgaaacctcatctctactaaaaatacaaaaaaattagccaagtgtggtggccggtgcctgtagtcccacctactctggaggctgaggcaggagaatgggatgaacccgggaggcgaagcttgcagtaagccgagatcgcgccactgcactccagcctgggtgacagagggagactccatctcaaaaaaaaagagagaaagtaaaggaataaaagaatggctaccccatagacggagcagccgtgagggctgctggttgcccatttttatggttatttcttgatgatatgctaaacaaggagtggatttttcatgcctcctctttttagaccatatagggtaacttcttgatgttgccgtggcatttgtaaactgtcatggtgctggtaggagtgtagcagggaggatgatgggaggtcagtcttgtctctattttggttttggtgggttttggccagctccttcactgcaacctgttttatcagcaaggtctttatgactggtattttgtgctgaccttctatgtcatcctgtgacttagaatgccttaaccatcagggaatgcagcccagtagtttcagcctcatttttcctggctcctatttaagatggagttgctctggttcacacacctctgacatgatcattgcccactgcggcttccacctcccgggttcaagagatcctcctgcctcaccctcccaaggtgctgggactacaggtgtgtgccaccacgctcagctaatttttgtattttttgtagagatggtgtttttccatgttgcccaggctggtctcaaactcctgggctcaagcaatccttctgtctcagcctcccaaagtactgggattacaggcatgtcccaccatgcccagactaatatttacttttaatcagactaagatagggttactacttgagttgctatggctccagctgaaagaaagcccgtgcagtcatatcacgcgtaaacatttgctttatgctaaaaatatggtggacctggcattacagctattacaaatctcctaagatgtctcgggtagtgtattagttacttttcatactgctatgaagaaatactggaaactgggtaatttataaagaaaaagaggtttaatgtactcacagttccacaaggctggagaggcctcagaatcatggtggaaggcaaggagcaaaaaggtatgtcttccatggcagcaggcaagagagcacgtgcagggaaactgccctttataaaaccatcagatttagtgagatgtattcactatcacgagaacagtatgggaaaaacctgcccccatgattcgattacctcctaccgggtccctcccacgacacatggggattatgggaactacaattcaagatgaaatttgggtggggacgcagccaaaccatatcgggtagcaacaacctagggtcagttttgcaggtggtaaagccatttaccaagatagttgtaggtaaagaagggcagatttattagagaaattgtgaaaatatgttgcagtgggcagctcagcagagaaggggctacctgcaaagaggcaagggctggaggaaagttttatagggtcctgctgaagggtgctacgtgtggaatgaggtcattgtgcccgcaggttgtttgtgattagctgtttctaacaattgttcatacaatcattgttcattattgttctcaacttggggctctccccaacctggggacccttccttattgttgcttacttatcaggtctccacataaaggtgtggaaacttcattcattcatatcttcaacacaaattgtaggtagcctgttttttaaaacatttattcaacaaatatttagtccaagccactattacttattaccttctctactattgtatggacttttaactatctctgacactattcactattcttccacattctctattatttatacctatggtaaaatttgccagtttgaccatacaactaatactcacagggaatatatagagtctagaagaaaatatacaggtccttaaaggctgccctgccaacaaaaccataacgcaggaacaaacatcacaactatgccaaataatcaatcctacaatgtccaaaattttactttaaaactggaatttccagacttcctttctgcattaaccagtttaactagacagtaacgaaatattcctactttatgctgtgatagtttgtttatttatttatttatttatttatttgagacagagtttcgctcttgttgcccaggctggagtgcagtggcacgatctcagctcaccacaacctccgcctcccaggttcaagcgattctcctgcctcagcctcccgagtagctgggattacaggcatgtaccaccacgcccgggtaattttgtatttttagtagagacggggggtttctccatgttggtcaggctggtctagaactccagacctcaggtgatacccctgcctcagcctcccaatgtgctgggattacagctgtgaagccaccgcgcccggctgctgtgatagttgagatgtaaaccaaaaataaaattctaagccacccaatccgactgaatggacccttcctgttgagcaaggacattccaaagtaaactgaaaagaccagcttaggccatgatgggaaggggaggtgtcaacatgcctcattctaccttcctccctctggaatccagacacaactgaccagcattaacattaaaacagagatcttaagctgggcacagtggctcatgcctgtaatcccagcactttgggaggccaaggtgggatcacctgaggtcagaagttcaagaccagcctggccagtatggtgaagccatgtctctactaaaaatacaaaattagccggacattgtggtgcacgtctgtcatcccagcaaggcaggcgaatcacttgaacccaggaagcagaggttgcagtgagccaggatcatgccattgcactccagcctggtcaacggagcgagactccgcctcattaaaaaaaaaaaaaaaaaaaattagccgggcgtggtggcgggcacatgtagtcccagctactagggaggctgaggcaggagaatggtgtgaaccagggaggcggagcttgcagtgagccgagattgtgccactgcactccagcctggacagaaatgcatttcataatgcattttaattgcattagcagtgatttaatttttttagatgttaaaacttatgggtgaaagtggattaaatgtagccaaatgcaacatcaaaatcttcaggcacaaaaacccattaactttttcatactctcagaaggtgaacctaatttcaaatgaaagctgcctccagaatatattgttaagcgtattctagatataattcattttggcaaacatactgtagaaattcacataacattttactgtactaaaagtaaattgcccatgtaacaaaaaatatcttttcagagcttgaaatgaattttaaaggatgactgatggtccttggaagagaaatagtaaacaaataaggtttgtagcaatgatgtatgagttagaaattgcagttccagatgatctctttattaaagagacgatctacacttaatttggtcaagtgttatgaacatagttcatgttaagtctccatttaaatacaacctgaaataccaaagttaattttcttttctttctttctttttttttttttttttttagaaggagtcttgctctgttgcccttcctggagtgcagtgacgtgatcttggctcactgcaacctccacctcctgggcttgagcgatcctactgcctcagccccccaagtagctgggaggacaggcgcaagccacggcactcagctaatttttgtatttttcgtagagatagggtttcaccatgttgcccaatttggtctcgaactcctgagctcaagtgatccgcccgccttggcctcccaaagtgctgggattacaggcatgagccaccgtgcctggccagaaaattgtaaacacacacaaactctcaagtggcctaattccctctcaccaaaccaatcacaatacagataaaagagaataacttgtgttcatttttgtacaaacaaaaaagatataaattgtgaatgatgcatgatttttaattacaagtaaactgggcaaatgcttctgcattatttaaagctaaaaggtgatcagtggaaactttcctctgttagtactctaatactttttatatttatcggctcactacaacctgtgcctaccaggttcaagcgattctcctgtctcagccacctgagtagccgagaccacaggcacgcactaccatgtccggctaattttgtatttttaatagagacagggtttcaccgtgttggccatgctggtcttgaactcctgacctcaaccgatccgcctgccttggcctcccaaagttctgggattacaagcgtgagccaccgcgcccagccttattataattgttactatttaaatctcttttgctctctccttcaagagagacctcatcccattcagttgcttccatttatttattcatcttctgcctcctgggctcgagagatcctccagcgtgagtctcccaagtagctgggactacaggctcacaccaccaagcttggctaaattttgtaggttttggagagacaggctcttgccacgttgcctaggctggtctcaaactcctgggctcagatgatccacctgccttcgcctcccaaagcactgggacatgagccaccacgcccagccgcaagtacttttacacaaaatgcaaacaccattcttccatcataaaagtgataccacagcttccgtgaagttttgccaggtagtactcataattaccttgggtaaactttttgatgttaaactgtatcttcttattacgagtttttccattgtattaactgcttttacaacaacacaaataacaagttattttacaaaccatttagaaatttctgtactatggtcccagtaatgtaaaatatattaatgcctattacattcagataaattatacacttggaaaccacatacttatgacttacagaaatttacataaacaaattatagaaattatatgctcaatttttaggtatatagtcttaaattaagcttaaatatacattctcaagataaattaacagttcagggcttcacaacttgaaatctgtggaagatgacattggagacaacagaactctggtggaattcttagatggaatttgccgaaactttttttttttttt

SEQ ID NO: 823 - DNA, 2840 bp, Homo Sapiens
gttttgcttttactcctcctagaagcaatggaaccttgcctgttccctgggggtgagacggatgactgcccctacattagctacctaacatttttgcttctccggacagaagagtaagggcaaggggacaagacccatctccccaaagcagctgatccccacttgcacaccaaactaccaatgaagctagccatttctggtctcccatcctgacttttctgagcacatggtgaagatctgtggaaaacattttgatgaagagagagtccttggaaggtgtcatcaggtattgaccaaacaagccactgtcctggatttgcctgtttttccggttccaaggccattcttctgccttgagtggttccttgagactctttatcatcttgaccttcccagaagagagctccacaaagagcacatcagtttgtgtgcttgaactaccgtagatgttatattggtgggcttcagtaaaggatggttgaaatgccagatcagatatgtgcagatttgtgtaaatatcaaaagcctcctgtatttctcctctgatggtaatgtactgaacccttacaagacctttcacatcattaatgctgacaaggtagtggccatctggagagacatatggagtgcccgtcacatcactattgaacccaatgactgagtcagttacaccgtccaccatgacctgtggggaaactgctccggtgctgtcaggtttgcagccaatgaagtagtagcctcccaagtgtgtatatgccaatgactgaggaacgcacttatagtccttcaagttaattgtcttgatgtatgacatggtttcaagatcaattttttgtagtgcagcttcatctttatgaagaataaatccaaacctgaaaaaaatgaaaatcagagttagacaggaagcaatggagtttttagccgtaagaaaaaaactagatacaggtggaaaggtccatcgcaggctctaattgtcaggcgaggcagcaatttgtgttacaattgtgctagaattaatctgtagattgtgccactctccttctttctctaggtcattctttcattacatccaaatcatcataactcatgctgtagaaagaaaaataattaaaagcaatacatctagttaattgcagcaacaaattttgcttttaacatagtggaaagaagaagtatacattattctgtaagtctctagaccatgtaatattaaataagcttggttaactattgccaaacccagcaagagtaaaaggctcgaatatatattggtttcactcatttcatttacttcttatattgttttttgaccattaaataaatctgacactcatcattatttagataaatttaagtataacatttttcaacctttcaatgtttatatgttatttttaatgatatgcctgcattttatttgttatcctatactgaataatgaagaactttatttttatattaaagccaattaaacaattgtttgtttgttttgttgaccttaaattagttcagaacttttcaaagcatatttgctaaatattgcttgagaattatcagagatacctgtggcaagtataaatatatttttaaactcacctagaacacaagcaactttctagcaaaaataagttaaacaagatacaatgagatagaaactattaaacaaaattaaacaaaattatatccaaagtagatattggccaatagaattgtaaaggacttttatttatgtttgcattaacaatattgattgtcaccttctaatagttctaaaagctcataataaaaataagagaaatatttttccattcactgtgttcataagtaatacaatgaaattaccttattatgagtattaagataaagcaaaacaaaaactctaaagagagccaattatgttatcatcacctgtgtaattatctttatgctaattatcacacataattatgacatgtagttttatttatgtaaaaaatgaccatttctacacatagtacaaaatatggtgcaatcagagtaatatctctttaaaattttaaatgtcagcatttagcaagctcaaaaatataaataaacatatattaaatatcatagaaaaataaaatattctcaaaatcagtcccgttttgcaattgcagaagaaagggagtgcctacacacagatgttttacgaaaatagacataaaattgtaattgtttccattcttcttacattaaatatagttgacaaaccatattataattttagctacatttaaaatttatgaggagactatttgctgtcattggagagagtacaaattcttctatatgaatgaaaattcacagtgtatagctactcctttataaaactttcttaaatatttgttaaacaactactaaatgcaaggcactgggaatatattgcagatcaacataactctccctgtctccaatgagtctagacattttgagtgataaaaaagtgaaacagggctagtgaataaagcttgattatagcattctgctatactattacctaattttgtaactatttcttgttccatgtatttgaaatggcataaagcaatatatttgaaaataatattttgagtgtatttctgaatgatgcccaccacttgtagcttatttgctaactgtttatcttttctgtgtccttaataaatgtgtttgtgtcctttcagtaaacccagctcataccatacccattcaggataaatttcagtcttgattatgatggtatgaagaaacattcatactgttgataattacttatattttcattaaaatattaatgccttgtgtgtaaacatagtgtagttttaaaatcctatctgaat

SEQ ID NO: 824 - DNA, 1430 bp, Homo Sapiens
gtttttggtggttcttacagacttgagatggggcttgtcttaaggaaacaaggtgccctgaatctaaagactgactaaaggtggtagaacttaagctatttaggtgatcctgaaaccaacagggacagttatggtattgactagtgggaacttttaagagccataagactggagaagtcaaatgctgaccaattatatcaaacccacctggggaacaaactaagtcaaaattactagggtggctaaaagctgagaaatgaactaggtggcagttaggactgctgaacaaacccatctcaccatagcagagaaatattagaatacacctagagccatgtaaagattcaggagtgctaaaagcatgaattcccctccttccctccaccacccccaaaataagcttctgcctgaatgaaggtaactgggaatctgcaatttttttctttcctgcacaaataaccacttccccttattcaaataaaataaaggatatatctagaaatctgatcatttttaaatatttccagaagtggtctagtttagaactaaggctggttagaccggggcaatgttccaggagtacagaaaggatcttccagggtcttctagataaggaatgtccttcaaatttctacaagaaagtctgcagcatactgcctttcaagattaatggacaggatgatttggttatggttttacttgatgggtggacgtaagttccactaagaggtagactttccactaagatcaaagcttctgttatctaatttataattctaagttagctggggctctgtactaataagattttgaaagacttagtacccacatatcacaattaagctactctcttcctagtatgcagataacaatcaagataatactcagaaattctgtcaaggcttggcactagtcaaaaggattaaggatgtatacagggagaagcatatgtaggcagtgcgataaagataaaaagccatgttgcaacagtaaactggtatcttctgggactaaggacagcatattaacagctaaatgtacttcactctgcttagagctttagtaatacttcagatattgttatagagcagaaaaacaaaaactgccttatttgtgaccttctataattgccctacccaaaattaaaatgaccaaccattacaaacttaaaaggccatcatacatggtatttttaacttctgtatttccttctacaaatcttgtgaaatttttaacttacaagatcttgtcgttctgtcatgctcatcttctctactattgaccagaaccaacgcttgaactgcagaagcttctcagcattttctcctaagaatgaagaatgtaaataaaatatactataccagttgttgttattatctgtagaatattactaatcttcttataataaaaggatacagattaaaacatta

SEQ ID NO: 825 - DNA, 8928 bp, Homo Sapiens
aatttcaccatcctcacctccccacagcacatctgaggcccatctggagaatggttaccagaggctgggaagggtagtgggagattgaggggaggtggggatagttgaactctcgtgagttcaattgttttcatttttagagcccacaaataactaagaacatgcaatgtttgtctttctgttcctggcttatttcgcttaacataatgatcttcagcttcatccatgaagtcctgcaacattttcggtgcccaatgtggggctcaaaaagcgaaagccatgttggttcaccacatgtatcgcatcctgataatgtgaagtgaaaaagtagagcctggaagcctttgtaagatgactgtgccagaggaggaagataaatatctcgatgctatggaggcctgtcagctctttgaagtatctgggcaatatcaagatttctacttcagatgaaaaaacaaatagttattcattgaccctgttgccgccaagaaagaggtgaaaggtgaacccccaacccacggaaagatccagccaagtaaggaactgcaaaatattgaatgactaattctccaaacaaggagaacaagaagatttatactagccatgcaaggaatctttggaagtctaacagacctgacttgaagagaaggctttaaacaagaaattcttcattctggaacagtgattcttaaagtgcggttcagagaccctgggagacactgacattctttcagagtgtgagtgaggatttcctctttgcaactacaatctgtgtaaggttggattttctttacatacataaactaaaataagattgcaataagatgaatgcagaagcagataagagaatccagctgtcttaagttagacttcacagagatttgcaaaaatccaaacaagaccactctcgtcattaaagttattttccatttgttatggtgaacttattttgcaggaaatttgttatttatagtaacatacaattttgttttttgatcattttaaataaattaataaatattataagttttctatttttaaaattatacatgtcagaaaagaacagttctttcaggtcctcaacaattttaagactattaacttgttttggatcaaaaagttctagatttgctattctagacatgaatcctttgaaattaattggcttcataagtatatttttcaagtttgtggcttgtcctgtaaccttctactgtgtagaagttttaaattttaatttaaagaaatttaaaattttttcatttttgtttgtgcttttggtgtcatatttaggaaatccttctctaccttgagttcatgaaaatatcctcttatatttagtatttacagtttgttcttcatctttaggtctataatttattgaaaatatagttttgtatgtgatgtaagctaaagatattttttaaaacttgatatggataacacattttggcaatattattcatccactcattctcccactgactttccctctgccacttacttacctacataagaatttgtcgtggagattctcttttctattcttttagtctaatggcttaattgttgatcaattaccctttttaactattgatgctttagagtaagtcttgatataaagccatgtaagtcccttgaattagtctcccacttttccttcttaaaaacattctgggatcttcttggcctttaactcctctgacttaattttaggatcaatttctcagattacattaacaacctgttcaaattgcatagattttataggtaaatctgtataaaatttacatgttataatattggggctttttattcataaacattttcaccaacgttttagtttcatatcttccaataagattttataatttttcatacctatcttagatgattttggttgcatttattttttatagttttagttttattgtcaatgcagctttttccaattcaattttataacagttttgctggttaaaaaaaaaaaaaagactatttattttgtgtattggtttttaaattgtacaatgtttctgaattttcttacttccaaacagtcgtctataaattatcttgattgtctaaaatgtgaaattcatatactatgagaatgataattttattttttcattttcaattcttaaacttctgatgacacttggctggaacctccttcactaggttgaaaataagtggcaacagtggtatccttgttctgttattgattccaagagcctgcctctaatgtttccccatgtattatgatgtttgtgtaaattttgatagaccttatttattaagtaaaaagattctcttctagttcaagtttggtctacaagtttttattgtgaaagtgaactgaattttagaaataccttttaatgtgtataaaaaattatatctttatttctgttaatgtgataaattacattaagagattttattaatatttggttatctttgtatttcaacaattatttggttatctttgtatttcaacaattatagtcatattattaaatattaatttggttagctaatattttatttttatgattttgacatctactttcataagtaactttatttttaactggttttactgccaaggttatactctcatagtaactgggggtttgttacataggtatacacgtgacatggtggtttgctgcacccatcaacctgtcatctacattaggtatttctcctagtgctatccctcccccttacctccaccccctcacaggaaccggtgtgtgatgttccattccctgtgtccatatgttctcgttgttcaactcccacttatgagaacatgtgtggtgtttggttttctgttcttgtgacagtttgctaagaatgatggtttctagcttcatccatgtccctgcaaaggacatgaactcatccttttttatggatgtataatattccatggtgtatatgtgccacattttctttacctagtctatcattgatgggcattcgggttggttccaagtctttgctattgtgaacagtgctgcaataaacatatgtgtgcatgtgtctttataatagaatggttcataatcctttatgtatatacccagtaatgggattgctgaggccaatggtgttcctggttctagatccttgaggaaccaccacactatcttccacaatggttgaactaattgatacttccaccaacagtgtaaaagcgttcctgtttctccatatcctctctagcatccattgtatcctgacttttaaatgatcaccattctaactggtgtgagatggtatctcattgtggttttgatttgtgtttctctaatgaccagtgatgatgagcttttcttcatgtttgttggctgcataatgtcttcttttgagaagtgctcattcatattctttgctcactttttgatggcattgtttttttcttgcaaatttgtttaagttctttgtagattctggatattagccctttgtcagatggatagattgcaaaatttttctcccaatcggcaggttgcctgttcactctgatgatagtttcttttgctgtgcagaagttctttagtttaattagatcccatttgtcaattttggcttttgtgcccattgcttttggtgttttagtcatgaagtctttgcccatgcctatgtcctgaatagtattgcctaggttttcttctacggtttttacggttttaggtcttgggtttacgtctttaatccatcttgagtgaatttctgtataaggtgtaaggaaggggtccagtttcagttttctgcatatggctagccagttttcccgacaccatttattaaatagggaatcctttccccattgattgtttttgtcaggtttgtcaaaggtcagatggttgtagatgtgtggtgttatttctgaggcctctattgtgttccattggtctatatatctgttttggtaccagtaccatgctgttttggttactgtagccttgtagtatggtttgaagtcaggtagcatgatgcctccagctttgttctttttgcttaggattgtcttggctatgcgggctctttttttgttccagatgaaacttaaagtagtttttttctaattctgtgaagaaagtcaatggtaacttgatggggatagcactgaatctgtaaattactttgggcagtatggccattttcacaatattgattcttcctatccatgatcatgggatgtttttccatttatttgtgtcctctctgatttccttgagcagtggtttgtagttctccttgaagaggtccttcacatccctcgtaggttgtattcctaggtattttattctctttgtagcaattgtgaatggaagtacactcataatttggctgtttttctgttattggtttataggaatgcttgtgatttttgcacattgattttgtatcctgagactttgctgaagttgcttatcagcttaaggagattttgggctgatatgatggggttttctaaatatacaatcatgtcatctgcaaacagagacaacttgacttcctcttttactatttgaataccctttatttctttctcttgcctgaacgccctggccagaacttcccatactatgttgaataggagtcgtaagagagggcatccttgtcttgtgccagttttcaaagggaattcttccagttattgcccattcagtatggtattggctgtgggtttgtcataaatagctcttattattttgagatatgtttcatcaatacctagattattgagaatttttagcatgaatgggtgttgaattttgacaaaggccttttctgcatctaatcatgtggtttttgtcattgattctgtttatgtgatggattatgtttattgatgtacgtatgttgaaccagccttgcatcccagggatgaagccgacttgattgtggtagataagctttttgatgtgctactggattcagtttgccagtattttgttgaggattttcgcaccaatgttcatcagggatattggcctgaaattttctttttttttttgttgtgtcttggtatcaggatgatgatggcctcataaaatgaggtagggaggattccctctttttctattgattggaatcgtttcagaaggaatggtaccagcttctcttcgtacctctggtagaatttgactgtgaatccatctggtcctggactttttgtggttggtaggctattaattagtgcctcaattttagaacttgtcgtctattcagggattcgacttcttcctggtttagactttggaggatgtatgtgtccaggaatttatccatttcttctagatttcctattttatttgtatagaggtgtttatagtattctcagatggtagtttgaatttccgtgggatcactggtgacatcccctttatcattttttattgcatctatttgattgttctctcttttcttctttcttcgtctggctagcagtgtatctattttgttgatcttttcaaaaaaccaggtaatggattcattgattttttagaagagttttttgtgtctctatttccttcagttctgctagcttttgaatttgtttgctcttacttctctagcacttttaattgtgatgttagagtgtaaattttagatcattcctgctttctattgtgtgcatttagtgctataaacttccctctggtactttgagtctgtgttctcattgctttcagagaatatttacccagtaagtcattcaggagcaggttgttcagtttccatgtagttgtgcagttttgagtgagtttcttaatcctgagttctaattggattgcactgtgatctcagagactgtttatgatttctgttcttttgcatttgctgaggagtgttttacttccaattatgtggtcactattagaataagtgtgatgtggtgctgagaagaatgtatattctgttgatttggggtggagagttctgtagaagtctattaggtctgcttgttccagagctgagttcaagtcaagtcctgaatatccttgttaattttctgtcatgttgatcagtctattattggcagtggtgtgttaaattgtgtgggagtctaagtctctttgtaggtctctaagaacttgctttatgaatccgggcgctcctgcattgggtgcatctatatttaagacagttagctgttcttgttacattgatccctttaccatatttaatgcccttcttcgtctcttttgatctttgttggtttaaagtctgttttatcagagactagaattgcaactcctgctttttttttttttttttttttttttttttttttttttttgctatttgcttggtaaatatccctccatccctttattttgagcctatgtgtgtctttgcacgtgagatgggtctcctgaacacagcacactgataggtcttgactctttatccaatttgccagtctgtgtcttttaactgggggcatttagcccatttacatttaaggttaatattgttatgtatgaatatgatcctgtcattgtgatgctagctggttattgtgcctgttagttgatgcagtttcttcatagtgttgatggcctttacaatttgttacgtttgtggtaccagttgttcttttccatgttcagtgcttccttcaggagctctggtaaggcaggcctggtggtgacaaaatctctcagcatttgcttgtctgtaaagaattttatttctctttcacttatgaagcttagtttggctggatatgaaattctggcttgaaaattcttttctttaagaatgtcgaatatgggcccccactctcttctggcttgcagggtttctgcagagggatccactgttagtctgatgggcttccctttgtgggtaacctgacctttctatctggctgcccttaacattttttcgttcatttcaacctttgtgaatctgatgattatgtgtcttggggttgctcttctcaaggagtatctttgtggtgttctctgtatttcctgaatttgaatgttggcctgtcttgctaggttggggaagttctcctggataatatcctgaagagtgttttccattctccccatcactttcaggtacaacaatcaaaggcagatttagtcttttcacatagtcccatatttcttggaggctttgtttgttcctttttattcttttctctctaatcttgtcttctcactttatttcattaagttgatcttcaatctctgatattgtttcttctgctttattgatttggctattgatacttgtgtatgcttcacgaaatttttgagctgtgtttttcagctccatcaggtcatttatgttgttatctaaactggttattcatgttagcaattcttctgaccttttttcaaggttcttagcttccttgcatttggttagaacatgctcttttagctcagaggagttcgttattacccaccttctgtcaattcgtcaaacttattctctgtccagttttgttcccttgctggtgaggaggtgtgatcctttggaggggaagaggcattctggtttttgaaattttcagccctttcgagctagtttctccccatcttcgtggatttatctaccattggtgtttgattttggtgaccttcggatggggtctctgagtggacgtcctttcttattgatgttaatgctattcctttctgtttgttaatttttcttctaacaatcagaaccctctgctgcaggtctgctggagttttctggaggtccactccagaccctatttgcctggatatcaccagcagaggctacagaacagcaaagattgctgcctgttccttcctctgaaaacttcatcccagaggggcacctgccagatgccagccagagctctcctttatgaagtgtcttttgtcccctactgggaggtgtctcccagtcaggagacgtggggtcgggacccacttgaggagtcagtctgttccttagcagagatcaaatgctgtgctgggagatctgctgctctcttcagagccatcaggcagggatgtttaagtctgcctaagctgcactcacagtgccccttgccccaggtgctctgtcccagggagatagataggagttttatctattagcccctgactggggctcctgccttttttttcacaaatgccctgcccagagaggaggaatctagaaaggcggtctggccacagcagacttgctgagctgttgtgggctctgcccagtttgaacttcctggtgactttatttacactgtgaaggtaaaacagcctactcaagcctcagtaatggcagacgcccctccccagctcgagcatctcaggtcaacctcagactgctgtgctggcagcgagaatttcaagccagtggatcttagcttgctgggttctgtgagtgtggcacctgcccagccagaccacttggccccctggcctcagccccctttccagggcagtgaatggttctgtcctggcagtgaatggttctgtcctgctggcattccaggtgccattggggtatgaaaaaaagctcctgcagctagctaggtgtcttcccaaattgccacccagttttgtggttgaaacccagggccctggtggcggaggcaccagagggaatctcttggtctgcgggttgcaaagactgcgatgtatctgggctggagtacaccgttcacagtctttcacagcttcccttggctagggcagggaatccctgaccccttgcgctccccaggtgaggcaatgccccactttgcttcagcttgccctccgtgggctgcacccactgtccaacgagtcccaatgaaatgaattgggtacctcaattggaaatgtagaaatcacccatcttctgcattgatctcgctgggatctgcagaccggagctgttcctatttggccatcttgcccagaatctcaa

SEQ ID NO: 826 - DNA, 2221 bp, Homo Sapiens
acagaagtggttgggcgtcgtgaggaacgcatcggcggcagaacactcaagcggctggttgttgagagcacgccagctgaagagcacccctgcacactggcaggccatccacaggtgtcagaaactcagctcagctggaagaaacttgatgtaccaggtatcagagtagcaagtaaagccacaagccaaaaatgaaagagaatcttttaagtgcttatcgtgatggtgtaagtaattgtccaaaagaaacgccgattccttctgttccatttttacctgtggattgtggattgaaataaccattggaccatgaggagagactctgaagagaggctagtgatatgtgatataatactcttttgtgacgttggaccatggcagtgagccgcagctcccagtcagcaatgcgatcccaagaataaacaaccgattcttgacagtgtcctatgttgccagtcgattttgttcaacagtaggtacatatcacctgtagacccaaaacaacttcaaatagccatttccttcactgctgtgagcagatgtagacagcctgctgtgttaatttcctaaggctgctataacaagtaaccacaaacccggtgtctgtattagtccattctcacactactataaagaactacctgaaactgagtaagttataaagaaaagaggtttaattgactcacagttccacaggctgtataacaagacatggctagggagacctcaggaaacttacaatcatggcagaagggtgaagaggaaacaagcatgtcttcatatggcggcaggagaggaagagtgaagggagaagtgttacacacttttaagcaaccagatctcatgagaactccctcattatcatgagaactccctcactatcatgagaacagcaaggggaacatctgcccccatgatccaatccccttctaccaggtgtctcccccaacactgggaattatcaacgttgggaattatcacataaaatttgagtgaggacacagaaccaaatcatatcagtggcttaagacaatagaaatgtattatttcatagttcaggaggccagatattcaataggaaagtgatggcatgattgatttcttcaggaggctttcaggggaaatctttcttatcttctggtgttttctagcaatccctggcattccttgactttaagcagtgtaactccaatctctgcctccttgtaacatggtattctttgctttatgtgactgtgtattcatgtagccttcttacaaagataccagtctttgggtttaaggtccacattaatccagtatagtatgacatcatcttaactaagtgcatttgcggagaccctgtttccaaataagttaacttaggatctaggtggacaagactttctggaggacgcaattcagcccagtacatttgtttactgattatatatctatacacacacacacacacacacacacacacatatatataatatatattatatatacacacacagacactatatgtttatacatacaattatacatacaatatatagtataattatatatacatatagtgcattatatatgtataattgcaagtgtgtgtgtgtatatatatatatatataattttttaagggaataatgagttttgcatctgccataaaatcttttattcttcttgttagtgtaaacaaatgggagaagaaataagatttgacaaatatgccagggcaagattacagaaggacatatacattgtggtaaaaataataataataataataaaagtgattgctactttatggcaagaaggagcaataaaaatttgaaagtacttatgtagcatctactctgtggcaatactatacaagaatattctgaagagaggataaggagttaaaaagaaacatggcttgatatgtatcacagttcaaaaggaaaccattgtccattggtaaacgtagcacatttgggtttgttaagcttgaaattgaaaaaaaaaaaaaaaaaaaacaggtaaaaaaacaggtctagccaagctgaaatatacctagtgtaaataaaataataggatgaagtcccatgatatctcagtaagaaggcataaatacatgatcagggaagggattcagagctctgcaacattggcaaggtttttaccacaattatggtatttcttggcagaaataaaaaaattgggatataaaatgaaacaggcagttagagttata

SEQ ID NO: 827 - DNA, 4000 bp, Homo Sapiens
gtcttcctcctgctctgtccaggaggaagaagtgcctccttcctctttgctttctgcctgaattgtaactttcctgaggcctctccagcctgcttcctttccagcctgagaaaatgatgaaacaaagcagagaggaagaaaatcctggatctgtcttggccaatggttggagaaaaaagggtagtgctacctaagaaaatttaaagcaacatctgtcaataaaatctgttaaaagagtcaaggacactgtatttttacaaattgaaggttgtggcaaccctgcatcaagcaagactattagcaccattttttttttcacatagcctatgctcatgtgtgtctctgtgtcacattttggtaattcttgcaatatctcaagcttttgcattattgctgtatctgttatggtgatatgttatcagtgatctttgatgttactatcgtaattgttttggggggccatgaaccatcctctataagatggggacttcataaataaatgttgtgatgctttgactgctccactgacaggcagtttccccatctctctccctttcctcatgactctctattccatgagtcacaacaacattgaaactaggtcagttaataaccctattatgacccctaagtattcaagttaaataaagagttgcatgtctctcacttcaaatcaaaagctagaaattagtgagcttagtgaggaaggcaagttgaaacctgagataggctgaaagctaggtcctttatgccaaacagttaacctagttgagaatacaaaggaaatgttcttggaggaaattaaaagtgctactccaatgactacacgaatgatacaaaagcaaaaactgccttattaccaatatggggaagtttgagtggtctgggtagaagatcaaaccagccccaacattcccttaagccatagcttaattcggaaaaaaagcattatttctcttcaagtctatgaaggctgagagaggcgaggaagttgcagaagaaaatttgaaagctaacagaggttggttcatgaggtttagataaagaagccataaccataacataaaagtaaaaagggaaaccacagtgctaatgtagaagctgcagcaagttatccagaagatctagctaagataattgatgaaagtggctacaataaataacaaattttcagtgtagacaaaacaatcttctattggaaaaaggtgccatctaggactctaccagctgtagaggagaagacgttgcctggcttcaaaggacaggctgactctcttcttaagggttaatggagctggtaaatttaagctgaagcaaataactcatttaccattccaaaaatcataggactcttaagaactatactaaatctactcttcctgtgctctataaataaaacaacaaagcctagatgacagcacatctgtttacagcatactttactgaatatttcaagctcactgttgagacttactgctcagaaagaaagaatcctttcaaaatattactgttcattgccagtgcacctgggcacccaagagctctgatggagatgtacaagaaaactaatgttttcatgcctgctaacacaacatccattctataactcatggatcaaggagtatttaggctttcaagtcttgttattcaagaaaaacattttgtaaggttataactgacatggatggtgattcctctgatggatctaggcaaagtaaattgaaaactttctggaaaatattcatcattcttgaagccattaagaacattcatgattcacgggaggaggtgaaaatatcaacatttataagagtttggaaggagttgattttaattctcaggtatgaatttgagggcttcaagactagtggaggtagtggctgcagatgtaatagaaatagcaaaagaaataaaattagaagtggagcccaaaaatgtaactgaattgttgtaacctaccgataaaacttgaacagataaggagttacaaacaagtgaaggattggagaataggtcaccctacaatatgcctctttggcataagaattattttgtcctgaaggcagttgagaagaaacagatacagaaaagctctctaccttcctcctatttgcctaaaggcaggacacaaatttacaaaggtgttcctcctctactctttaccaggaagggaaaacattgatcacagaagacaaatttagactctcatcagcccaaacagatggaagctgtataataagctttactaagtagactttatccactattagttccccagttgttgccttcctacaattggccactcctagaagctcaaggcccttttcctgtgtcttgtcattttctaagaattttttgttctttgttgaagatgctatgtaagctagagttctaagccacttctataagagttactcactccctgggtatctccgacatatacatgaaatacacatattaataaataggttaggatcagaatcctgaaagacacaattctgactgccataacctcaaatattgacattcctgaagatcaaaatccctaaagtctaacatccctagcatctaagatccccaaaatcacaatcacggaatagttttatcatgttaagtagaactactaacttgttattgcctttatttggaaattaagtatggctaaaaagatgtgtatgagtgccaatttgacaagaggtggacttaattttagatgtcagcttaagtggatttaggaatacttgaaacttggtaaggcataaacttgtctgtgtgtctgtaagagtgtttccaaagaagattcatgtgtgaatctgagtggactaggtggggaagacctgccctcaacattggtggacaacatccaatttgctagagtcccagagagaacaaataccaagtaaattcattctctctgagagctgggacagacttttattctgctgtcttggacatcagagctccaggcttgccaacctttcaattccaggacttacaccaggggtcccaggggcctgaggctttcagctttgaactgagagtaacaccattggttttcctggttttcaatgtgaaaacattaaaacttcctcaataaataaagaaatgttcttatcatacacctgcatttttgaaagataaaatttctccaggtctcagctctttgggtgactgcatatgcattgatgaccctttgaggtttttgatcaatcttgtcaaaagtcttcatctgtccatcacagcatttcagataatcgcaggcataaagctgagtgcacaaaattgccaaccatactgataggcatttatacattttgttttttcacttatttctttatgaacatggttcatttgctagacactcatgtgcctgtcatttgtatacccaagtttacgtttgaaacaatatgtgttatattgccgtttctgtcgtgtaaattatgtatgacatgttctgatgtgttttatatgtttcccaaataaactgcctttttaaaatgtaaataaatgtcttttaacaaatttttaaattattttttccagagttataatttcagaaatttgatcacgtgggatttcaacattcaggattatgacattcagaattgcacctcttgggattaaataagctcctttaataaacttctatttgtttttctatttctaatatgaaagaaacagtaaaattggtgacagtaagagatttcaaagttaaagtttttaaacaggttaaatatgatacaatttcagatacaaatgaaagtaacttttttgacacaaaatagtacatataattctagactaaaattttgataatcagtataaataatgatttatataaaattatgttattcaaatacaatcaaggagatataaaaatatgaatacaacacagaaggaattacaaaagttgccagagatagaaggagatttgtacaagaatattcattactgctgtgtgtgtagtgctaaattattggtcctctagaggagactggag

SEQ ID NO: 828 - DNA, 829 bp, Homo Sapiens
ccagcttggagacaacatgtggttcttgacaactctgctcctttgggttccagttgatgggcaagtgggtgagtgatctctaactcagcttctccttctatgccactttcctacttccaaaggatgggtcctattaacctgcagaagagcatatagggaaagcagagaaagaagaaagatttataaattatgtaaaatctcccatattcagagcatgattttcataaaaactatgatttgtaagctttctttctaaagttttctgaatgagctctttcctctgagcgaaatgcctgaatgtatatataacagcaggaaagggccagaattgcacaaacactaaagtagtctgctgacactgaagtagtctgctgggtttcccaacatcccctaaaccagtcccctttacaagaaagcagagtgggttttttctcctcagaaagagccaggcaaatactgaaggcttcaaagagaggagtttgaacctccgtttccaatgtacaagctgctgaagccctgcaatgtactctcagagacagtatagctcagaggataaggaaaacagctccgcttggcttgcccaagtctaaaaccctgcttcattgctcccaacagaaaaacctacatcagtaatttaatcctcaggagccccagattcccaacacccagatgaggatttaataacaatgaacagaggtctctgcagcaggaggacactcttaaaggctggcttttgtaggtttccacttgcctatttttcaaataaatctaaatatgtatttttcccttgtgctatccacaaaagcctcaccagttgctcagagccctc

SEQ ID NO: 829 - DNA, 2056 bp, Homo Sapiens
atggcaatccaacagcagaatgggaggataaaataatcagaactagagatagctgaagcagccatcttgtgaccacaagcaacggactagtaggggaagagtcgacacactgaagagaagaaagcaagtgtttttttctagaaagaagaaagagaaaagtggattctcaactagaagcaaaaacatccactgaagtttgtgagagtgcaataggcaggtgccacagatctttctgaggaagtactaccatatgacttcaccttctcaggctgaggtatcagcttgactgtcactccacagatcaagactagaggtaaatgtaaacactatacaggtgggatgagaaacagctgttcagctgcctggctagaagaacaggcccagttctttgctacaggatggacatggaaaagttcaggcatttgaagttactggcgtcagccacatgagattgatgacgggattggcttctacaagaggtccatgtggttctcatttctgaaaacagatgtttggaaaccaatgttttcaaagataatatgaaactacaccaatatgctgcactatggagaaaaactaaccttgacagaagaaaaaagattttcttgaggcagaagatgaaggactattggtcgggacattcacagaagtctgttctgtaagttgggttatatggaagcagagatgctaggtcaacccatgttgtgccctccctcttttggtaagcaaaacactgatgcttatgacatcttccttttctttggtggtggccttgaaaattgttattccttccagaaagggctggatgtcactcgcttatgaatttgaatccttctctttttgccaaatgatagaactgagcttgctccatgagcttcatgtgtgtaaacattagtggggatccaagtggctctgcaggtagaatagacactcaggtccctcctgcccaagtccaggggcttgcttccatgaatccaatcctttagttcatatcagttcatggtgtaccagaagcctcaacacatctgcaaatttttacagaacatgtttgtgcaaggaaataaattaggtcaccaggccttcaaaggctccttccacttaggggtggtggagcccatgaagctgagaatcacccttgccagctgttggaacttgaaataatcctccaaaaacctcttgctattttaggagggtcatcctggtgggtctgtgtatgctgtaaaagagtggctcactatttaaccacccatctctactgtgctgatttagggaccacgatcacttgagcttttcttggtgcctgggatctgtctttctgcacagggataatctaggcttatttgtggcttttttcccctgcatttcctttacttgctcactttccttcttttcctcactatgtttccatttgaaatcagttttcacatatgcatttcagtgcaactctaccttcaggaacttactggattacacaggaaattccttatagtgtgtgaccatctgcactgcaaacaattttcagggaattgactagctactaataccacttacaaaaaatctaataaggggtttaacattttcataaggaaaattaatatttatattttctgttttggttgggttacatttttactattttgagaaaaaaagtattgcatttttaaaaagtgaacaaaaaaagctctcatacaattgaatggtattgccaaaagaaattaagaagtcagaatttgatgattcaatatattataaatatatttttgaccatagtcctaaactatcatctgtcaagttgtattattttgagtacataagtatttttcatgttcttatttgttttctataatgcctcataacatatatagctctgtgagtctgttctttcagaagatcttatctcttgttagttttcaaggatttccaggttcacagcagctgactttttactacacattttatgactctaaaaccattagaagaacatcaatgcttccctaaattggttttttggagaaaatgtaatatgtttgatgaattcaaataaaaagatggaaac

SEQ ID NO: 830 - DNA, 1798 bp, Homo Sapiens
acccccaatgtaattctgtataaactcatgaatattattttggatggtaaagcttcagtgagttttataatggttgattctcaactataaacatgaattatccagatcatttaaaatattaaacaaacttccttctagaatatgcttttaggcatcttctcttgaccatcaagtttgtgtatgttcaaggatacaaactttctaaaggcttaaatttttgcatttttaggaaatgatgcaaaatgaatcatatagtatactttgtaaccaaataacgtttttattatacatacttctgtcatattatttctattgctatttttttaggcaggaaatattaaaaagtgaataaactttttctgtcgtaatatattaatgatttcttcaacaaggaatatggcctatgagtaattacaaatcctcattactatgaatttgctatatttatatattgcttcacagtttagaaattacttttatatcaattgccttatttgttacttagcagcaacctaaggttattttgaataaggtgtgcaggggtcattatctctagtttgtagaagaataaactgaggttcagaaaggttgtgactttctcagggaaacaatagctattaaatggtggagagggaactaaagttctagttgtctatatttttttaattcctttttttttttttgagaccagatcttgctcttttttttgagaccggagtgcagtggcacaatcagtgcaggcttgacctcctgggctcaagtgatcctcctgcctaagcctcatgagtagctgggatcacaggtgtgtgccactatgcccagatgattttcaaaaattatttgtagaaacagggtctacctatgttgcccaaactggtctcaaactcctgggttcaagtgatccttccaccaaagcctcccaaagtgctgggattacaggtgtgagccactgcactggcttaaagctctagtttttttttcttttttttgagatggagtctcactctgtcacccaggctggagtgcagtggcgcgatcttggctcaccatggcctccgcctccccaattcaagcgcttctcctgcctcagcctcccgagtagctgggattacaggcgtgtgccaccatgcctggctaatttttctgtgtttagtagagaaggagttttgccatgttggctggtctcaaacttctggcctcaagcgatcggcccgcctcggcctcccagagtgctgagatttacaggcgtgagccactgtgcctggccaggctctagttttttaaaagacattttatcatggaaaatttcaaacatgtatagattaaacagaatactgtacacctatgtacccatcactcagccacgacaattattgatatcccaccattcttatatcatctatacatccaccaactctcagccccacgtgatgataatgatggtgatttttaaaaatttttaagaagtttacctatactgaaagcactagtcttagctatacagtcttgacaaatggttatacctatgtaactcatacgcctatcatgatagttctgtctctccaaaaaaaattcctgtatgtccttttgctgtcaactccccatcctgcccagaccagggctgttttgacttttttttttttccactggagactacttttgcttgttcttgaacttcttatgaatcaaatctctctgtatgtgttcttttgtgtgtggcttcttttattcagattcaagtctgtaaacgtctggttttttttaatcaggaatataatactatttgttgagtctggag

SEQ ID NO: 831 - DNA, 1893 bp, Homo Sapiens
ttttttatagagacatgtcttgctgtggttgcgcaggctggtcttgaactcctgggttcaagcgatcctcttgcatcagcctcccaaagtgctgggattataggcatgagccactgtatctggactcacttagaggagtctaatgtgaatggcccaatatcttccaataagaaagtcttctgtcaactctactaaaccacagatttaatcagaaaagtggcatttccaagtttttatttaataaagttcatgttgaaacttgggtagggaaaattggtaaataagtaggtagatggacaggacctggtggccagttatatttgattaatgataggaaagaagtatctaggtataatgcctgggtttttaggaaactacgagggttgatagggtcagagaaaatatatatgtagtgttagaagaaccttggtgaaaccaaccttttaggtgtaaaggattaagtagattcaaaagatactgcattttcagaagtcaaaaactagtggagagtggtaatcgcaatggaagaaaatgccaagagggaaggagaaagtgacctagatcagaaagacttaggaaggtcaatgcaaagtgtgtttattagatttgttaattgccaaagccttaagatagaatgagattgccttcattcactttcagcaaagccaagggcgttgtctttcccttttcatatctgggacctcattttatttcaattttatttgtctcaaatcaagatagtaggaataatgaattactgttcattctgattttttggtacttgcaaaagtatgtgtatgtttttaaacactcccccaacttccagacttttataagattgggaaaatagcacagataatgtaatactgattggccttagagccagtgaccctggacaactcacctaacctttctgagtttcccatatttccctttttatcttccccttcacttacatgggtgaattacaaaaaaagttttactaccctaacatcaggaaggtcattataatgtagtagcaaagagcatagactctaaagccaaactgtctctttgtgaatcttggctctgccacttacctgtgtgtcctggggaaagttaactttatgggcccctgtttcctcaactgtgatattaggatactttcagtgttcacctctaagagttgtagggagtcaacgagtaaacacatgtaaggcaccttttagaaagctgcctcctacatagtaacctttctaaatctttgctgctgttaccattatgacattatcatgataccagtatcatcctcagtcaacaaacgatagataactcagagaatgaaaaggttgttcctttatatagtttccctagaatcaccttgtaccactgctgctgagttgcaatcattcgttagtcgtatgtgacctagattccattttctaagattattcaacaatgtagaggatcagcgtagtggaaatacgtctataaacatttctaagaattgaattcattgtaattaatagcatcagagaagctgaaaatccaaagagctaatctcttaacttcatgatggaggacaaagattttatcttttggaattttaataatgtttccagcatgagattagccttcaatattgatttctggaattctgttttcccttgtttttcattgattaacctaaaacttttgagatgtagttcatatttttggtaatattgctatgattatataactgtaactgtctagaatttaatttctagcaagggaaatttaagccttttcctcagaattatttttcatgggaaaattcttactgatagattactggacttgagtcataatttattggttatcttattctgccctatctactctcagcactaattataaaaataatcaaagaaa

SEQ ID NO: 832 - DNA, 5883 bp, Homo Sapiens
gcagaagacgcggccgccacggctcaggcacacgcgggcgcccgggggctgcgcggccgcgccgcagaaggtgaaggaacagcgcgaggcacgcagccgccgcaccgtggcgcgcacgagctcagccggccggcgaccccagcgcgcccacaggacagtggcagccggaaagtgggttcctgcatggtaacaagaccttaaaattgtgtcactggagaaggacgtgcagttcccgctgaggagagacttggccactccaggacaacacaggactacaagtcaggaatttgaagatgaaaagtgctcaacagtgataaatcctaaatgtttcactgaacaacctttcagatagccttcttgaagtttgctgaattatggctataaggaccactccccacccctgctagatgaagtctcacttgcccaggttggagtgcagcgcgatctcagctcactgcaacgtccgcctcccaagttcaagtgattctcctgcctcagcctcccgagtagctgggattacaagcacatgccaccacacctggctaatttgtgtatttttagtagagatggggtttcaccatgttggccaggctggtctcaaactcctaacctcaggtgatcgtcccacctcagcctcccaacgtgctgggattacaggcgtgagccaccgcgcccggtcagactagggatttagaagcaagactttgtcatttataagaacactgcagaaaggaacaagaatgacccagctagccactgaagaccacctctgaaacccatcaacatgaccggctttctataggaaaagtctccacagactcaaaaagtctctagtttcttgcccttaggaaggcatgccctgggaataatagtttggggacaagagagagtagagtgtttactgtcctatcccccattaaatacatggcagaacttccccagggaaagcctatcatactgacattaactcagtacctgtttgaacttggagagcattcagaattctcatcagtcaaatggccagagctgagaaggatagcttgttttgtttgtttttgagacagggtcttgctatgtcacccaggctggagggcagtggtgcaatcccgactcactgcagcctcgacctcgtgggctcaagcaatcctccctcctcagtttcccaaagtgttgggattacaggcatgagccaccacacctggctaatttttgtattttttgtagagacaaggttttaccctgttgcccaggctggtttccaactcctgagctcaagccatctgcccaccttagcctcccaaagttgtgggattacaggcacatgccaccacacctggctaatttttatatttttttgtagagacaggattttgccatgttgcccaggcttgtctcgaactcctggattcaagcaatctacccgcctcggcctcccaaagtaccgggattacaagcgtgagccaccgtgcccagcctgggatactttctaagaaccaaggaactatgtagaaaatcttcgccgggcacagtggctcacgcctataatcccagcactttgggaggccaagatgggcagatcacgaggtcaggagatcgagaccatcctggctaacacagtgaaaccccgtctctattaaaaaatacaaaaaagttagccaggcgtggtggcgggcgcctgtaatcccagctactgaggaggctgaggcaggagaatggcgtgaacccaggaggcggagcttgtagtgagccaagattgcgccactgcactccagcctgggcgacagagcaagactccatctcaaaaaaaaaaaaagaaagaaaagaaaatcttgatctctattcagtaactttaatacgtatattaacatgttcttgtttttggaacaatcgtcaaatcaagcaaaaagtaattttattttgttaatcaaaataaagagaaaagtagacaatatttagagcatcaaaagaatttaaattagaacatctttaactattggaaatatgcatttgaactcatgtctttaagaggaaaataattatctttcctagctctttcactgagatggcctcagagtagccttaccccaagatgcacctgagtgctcagattcttgaatgggtgctcttctcctcattacaaggaactagaaatccttggagaaatcactgattctggtgttcaagagataccagataagctggaacatcttatgctaggaagcaggagaagcttcaaagaaaaataggtccaggcagaaggatgcaggagacaagctagaagtgccaaatcaggacgatttgagtatcaaattgaaatacacccaattatgaaggtacccaattttcaagagccggctgggcgcggtggctcacacctgtaatcctaccactctgggagactgaggcgggcagatcacctgaaatcaagagttcaagaccagcctgggcaacatggcgaaaccccatctctactaaaaatacaaaacttagccaggcgcagtggcatacacctgcagtcccacctactcaggaggctgagccaggagaatcacttgaacccaggagacagaggttgcagtgagccgagattgcaccactgcactcaagcctgggtgacagaaaaagactccatctcaaaaaaaaaaaaaaaaatgaagagccatgaaatccatggttatcctcaataaaatttaaatattcgaaaagaatgtaggataaaatgtgttactgctgagtctcgttatttggttatgtttgtattgattcatttgttgtattgataaagattagtaggtggcaaattcttcctttagaaggttgtttgtgacccaagagggcatcaatacaaagaccctaaagctgggattccgaagcacagagtcgcgggagagaaccaaagctcatcgcatctggtttaagactccttcagagttggatcagcctaaaaacaggacatggtacaagattttattcattccaaagattgtaaaaattaaattcatcctgagaatttatcagtctatgtgggagctacagacttctatgagcaagcagagtacctggcattcctgaccatgctatttctaccaatcaacaaaaactactagatactcagaggggatttaatacagagagctggctacaacatgacaaaacaccagacaagggagggcactgtggctcatgcctgtaatcccggcacttcgggaggccaaggcgggtggatcacctgaggtcaggagtttgagatcagctagccaacatggtgaaaccccgtctctactaaaaatacaaaaaattagccgggcatggtggcaggcacctgtaatcccagctacttgggaggctgaggcaggagaatcgcttgaacctgggaggcggaggttgcagtgagccaagatcatgcccttgcactccagcctgggcaacaagagtgaaactccgtctgaaataaataaataaataaacaaacggacacacaccacagaagggacagtgaggcaacccagggaatagaaagagcagaagccgcgaccctctgtagggctgagggcacacaacacaggtcaagttaccgtcgcccgggatccagggtcccctggtggaagctggaacccacagatcagtgctgtgggagatggagccacagagaaacaactgctgctggagacatcagcaggggaagaaggcggaaaaatactgtagccgctccacacctccagcccaacgccccatggcggaacttcactagaggccccacggcagaagagcctccaggaacctccttgtggaccagaggagagagatagagaggcggcaggaggcaagggtgtgtctaagacaaacaggccacagccagcccctggccttcctgaaactcctcccttgggttcttttaaaattcaatattctgcttctgttccagggttaatgggctgaactgtgtccccccaaattctaatgttgaagttctaacccccagtacctcagaatgggactgcatcaggagacaggtactttaaaatagtcattaaggtaaaatgaggtcaccacctaatctgttatgactggtatccttataaggataaaatagtcattaaggtgaaatgaggtcatcacctaatctgttatgactggtatccttataaggagaggagactagacacagacatgcacagggggacaatcctgtaaggacaaagggagaagacagccatctccaagccaaggagagaggcctcaggagaaaccaaccccgcccacaccttcatcttggacttctagcttccagaactggggaaatgaatttctgttgttgaagccccagtctgcaatacttagttatagcagcccttgcgaaccagcacatccaagttctccgtctctgtctctaacccctctctcaactgtcggccataagtgagcctctgcccccaacttctggcctcctctatgttctcttccttggtgacctctggcagtgacgctcagtcctcatggccagctctggcctctcccaggctctggcgccgcaatcatctcttccacttgtctctgcttggatagtctgtcagcatctcaaaggcaacatgaataaaaccaaatgcattttttcctcccacaaattatctctttatcctgatttctcttatctctgttcatgacttgttcaccttttcactaggacccagaattcatgcatcttggagtcccaacttctccagcccctgtgtcttgtttatttccatagcagttggtaggcgggacctctgcacagtctcacatggtcccttctttctagtccaggcccagctcagccctcaccagaacaggcactagcacgacagcctgctggatgattcccggtgcccgtcccctgtttcccacggttctgcctcatccagcacactctgcacttgactgcctaaagcacagcgctcatcccatcactcctgcttctcaaactcctgcagtgcctgcccccaccccagaaagtgcaggcagtcttgcctggcattcaagaccttccactgagcctaagcaacatagtgagaccccatctctacaaaaaatttaaaaattagccaggcatggtggcacgtgcctatagccccagctacttgggaggctgaggcgggagaactgctggagcccgggagttccaggatgtagtgatccatgttcataccactgcactccagcctgggcaacagaagagaccccatctctaaaaagaaaagaaaaagaccttccattggacccacctaaccgggtctccctcattggcagccattcacttattccacgttcattctgcacctcctgcacacgaggtgctatgccaattactggatacatttaatccctcaacaactctgcatggtgaccattattgtccccatcttgcaaaggaagaaactgaattttagaacagttgaattttagaacttgagctcccataattaggtggggaaactgatgtttgaatttgtgtccttttggccccaaagtccttctctggataaactaggcaaccaagagcaaagaatgctctatacccgacaaaaatagaaatgaaactcaagatccaagacgcaagagtggcagaaggttcaaggtgcaccactgccagccctgacagcctttgtatccaggtcagttgaacaggccgggattgtccccaacttggacacatctaaaaagctgcaggtgggatgtcatcaaaatcacctgggaaaacaacctgctctgaaaacagaggcatgatccaaaagacaaagaggtttgtgataccctttctgtacaatagctgactatcagtaagtcattactgttttaaggaagtcagtcacacacacacacacacgcatacacacacagaaa

SEQ ID NO: 833 - DNA, 1471 bp, Homo Sapiens
cggccttttacacagcacagcacccagccctcggcagcccagagcaggaaccaacagggtaggtgcccaggggccccaaaggtcagagttcctcgcacagctgccagggagcacagggaccgcagcacagggtcttctgctcagcaccgggaccccgctcgctgcagctaaagaaacagatacgtccaagggctccacggccggggccgggcacctggaacagggtggtcctggggcggccacatccactccttccagctaacacttcacagagatgtctgactgatgtccactgctcagctgcacccctgagctggtgagcattcaggtagagcacccacctctacttttctcaccccgaaaatcagagactggttctcagctggtgcagccaccgccccagcgtaccggatgcaggactttccctgcgaacactggacagtcccagcaaagcagacggtgggtcgctctgtatctctgaagaacagctgggcctgcgtgtgtcattctcaggcatctggcccagggcttctcctccaggaaggtggctgctcagctccgggcactgccaggggccacggaccccgcctcctttccaggctgttccacagcatctgccttcatactcacagccaccgcggcgtgcgtcccagggattctcagaatagaattctgtgcctctctcgcctctggaagtgaccgcgctctgtaggaaaatatcacagcacgccggcctcgaaaggccacgacgtggctctaaactgctctaagtatgtcagttacttagaacaatcagaaaggggcagaacaagctggggtgtggagtcaggggtcagggcacagacagcacctcttgtcttgcagagagaatgctagcaatttgcaagttacttgaaaaggtttgtgattttccaacgccctgagtaattctagccaaaatgcgtgactcgcctcacactagatgcttgctgtaattgtgtctctgtattaaactgaccgttctttggagcttcagaatggaccaggaggaaaaggtaaataccaacctcgctacaacctcagaggcatcaacgccctcctgctacagacgcatctgttctcgcctggctcctgccggctgccctgggagaggccacaaaatgccctccacggagacaaggcctgagaaccttcgggacgcccgctgccgctcactgtgttgaagaactgcccgttccgcaccccgggccctagacacacggctctgtggaggacgaggaagtgccgtcaggtgagacttcaccgtgaaatatcttctgagacacaacaatctccctgaattaaaactacagactctaatttataaaaactgtgtgtttcaaaagctccaagtgtttacattctccgattcatcattccttcttctaatttattttaggaaataatgcaaagtactcacaaaaatttatatagaaagatgttcattgcagaa

SEQ ID NO: 834 - DNA, 4401 bp, Homo Sapiens
ccccgcggcaaagttgcccacggagaggctctgctgcacgatctcgcgcacctccttgtcggacagcaggtagggagagcgcactgggaagctcggtgaaggaccaccacctcatccaaggggatcttgcagaagtccttgctgctcctctcaggggcagcgggggaccctcaaactcctccctgaacctctcaggattgattgcatagctcctcatgtttctacactcggggccagcacgtggaccttgcactgctgctggtaggagcgcctctgttcgtgttccagtgcaggttgcccatgaactccagggtccagacgcgattgtttttggtgcagaggtagagcaggtgcacttagtggcgaatgagcttgatgcaggacgggtccagctgcttcttgcccagggagtcgctgcagctgtactgcttgtgcaggttgtcatgggtgaagagcttggggaacaggggcaccagcaggcgcgaggtgaagttgccgatggacaggctgctctcctagatactgcgaagatgctcgttgctgagcaggcagtcggcgccgggcaactccaagttgggctggggatctccaatttgtccaagtcgataggtaccagtcagatcttcttggagcggcaccgctcgcccttgaagctgtcctccaccctgattactgagatgtcatcgggcaggctggaggagttgtagcagttgttgcgtggggggcttgccttcgctgcccgcgtccagccccaggccctggagcttgtcgttgatgcactgggcgcaccgctgcagccaggcctcctcctcctgcatgtgggggaagtagacctccgtgtagttgctgatgatctgcagcctctgcgggtccagctcctgcttgccgccgtccccgtagcagctgtcctgctcacccagcttgctgtagtggaagagctcagggaagagccagtggaggaggaagacggcaaactcaccgggtgaagaggcttcatccaggaactaggtgagggcctacatgtccaccacgtggtctgaggcgatggtgctgctcctgtccagagacaggccctcctcctcatctttgtggtccaggaagtggccggggtccactgctcagcctcaagctggcagcctggccaccaggctggctgttctccatctcccgctgggcccagaagcggctgaagaacttactcagctggggcaagcactcggcctgtcacacagccctctccttcaccgaggggtagtagacctccatgtagttgtggatgagctgcaggtgcagtgactccagcttaagcttggcctcaaagctgcaggcactgcagccttgggagaagttgactgtggctgaagagcttggggaagagctgcaccagcagccagcaggccaggaccccacctgacaggctctggtccaagatctgcttgagctccatgcccgtgagctgctatggggtggtgggggtcggctggaatttggccaccatctcagtggggttcaccttcagggagagcaggtccactttgctgtgcagctgggacctgttggacgtgagcgtgttgagcatgtagaacatctcctggatcaggaagtagatgttagggtcactgttggtggctgccccagtgctgccacagtcccatttctatggctcattcaggagcctaagcagcaaggggctgttgctggcatttgccttctggaagagctcatatgtgtttagcaggtcccctgagggagggttcttcttctccatgaccttgtgcaagatgccatacagaggcttcttgtagtaaggggtggtggcatggttgcggggctcctccttgcctgcccacacagagcctgagctcctgccttgccagcctgctctccattgccttggcagggcgagctgttcttgggttccacatgcctgctaggagcgcctctgggatcagctacctcctctccacactggggatggagtctggctggccattgctgaccagctgagtccttgagggcagtaaagacgctgtccagagggtgcttctcagaagtcctggaattcacggagcagcctagagcagcatctttggcctctgtctccactctcacttcttagaagttcttctacatcaattttttttggagatggttctgactctgtcacccaggctggagtgcagcagttgatcagagctcactgcatccttgacctcccagactcaaaagagcctagctacttaggagtagctaggactacaggccacggccaccatgcctggctaatcttttaaattttttgtagaggcagaggtctctcactgtgttgcccagacaagtctcaaattctcgggctcaagtggtcctcccaaagtgctgggattaatggcgtgagacaccgtacctggccatattttttttttttttcaaaaaattcatttgtagagtttaaaaagtatctttcgatcaagagttcttattgtatttatgtttgcaaatttcatttcccattctgttgcttgccttttcactcagtgagttattttatgattacaaatccctattttttatgttattttattactatttattaacctatttatcttatttactagccttcaatagttactttttgagtctttttttaaatcttaaggtcatagaagtgtcctctgtattactttttaaaaactgtactgttttatgttacacattggcttctatatgaaataatttttgtgtatgttgtgaggttggatgttaatattcatttttctctgtaccgatgtatgaaagacaccacaatttattgaaaatgaatcttttcctcattgtactgaagcactatttttttcacaaatcagctaaatatattgtgtggttctctttatgagctctctattctgtttcattgaaatatctatacttgcaccttttccataatgtcataattgatatacatttataaaaactttatatctaatagtgtaagtcttcacattatattttttcttcaaagttatctatacactgcattttcatttgcattttatagtcagtttttcagttgccaccaaatataatgcagacaaattatgctattactaatcacagtattgtgattttcagtgtattacaaatatagatttatttaaaatactgaatctttcttctaataccaagaatgacataggaacatggtacacctttatttctgttgaatatctttaatttctctcagtaaaatctcacaattttcagtaaagggattgcatatgctatgttatattttatattaggaattcaatgtttcttcctggaaacatttcagatttttaatattttatttgatttagactcactatatttggaaagctttaattgtaattttatttttaatagatatagagctattcggatttgctatttattcttgtgtcactgttaatgattttctagaaatgtatctatttcatcaaattatgtcaaaatttttgacttaaagttacttattacattctctttttctatcccatgactatagaatctataatgatttccttgttattattgatgatatttagaatttgtggatactctttttttttttaatttcacgcataatcatggtatatttttatcagtcttttcaaagtaactttggcttttgctgatttcatttattttatgattgtttccttttctcatgcttcttatgtatcttctcttttctaattctttggatttaatttgacatcacattttaaatttttgagattgacaattagattattaattttcaagctttaattttttaaacaagcatatgcatttatctccaagctgaggtttgcctaagcctcccatcttttaacaagcagtatttttactttcatttttattaaattcaaaatatattttaatattcattgtaattacttttttgatgcatgaataacttagaaatgtgatgcttaatttctaaacatttggttactttcaaagtcttgctatagatttgcagcttaataacattgttgtacaaaaaaacactgtcaaggatttcaaatttttggtatttattgattcttgttatgggcctaacctcagcctatatctgtctatctaacctatctatctatctatctacctacctatctatctatctatctatcatctatctacctagatagacagagatatctatagatagctatggtaaattttgaaacacgttccaaatacattataataaattgtgtgttttgctatttttgggtgcagtttttatatcaaagtatttaatcctactgctttaaatttttgtattattattgatattttgtatcctttttgctatcagttattgaaaaaggtatattaaagtctttatgatcaaag

SEQ ID NO: 835 - DNA, 1795 bp, Homo Sapiens
tgcatgaacaaaatgaaaacttcaccaaagagaaataatagaaaagaactaaacagaaattctggagctcagcaatacaatgaatgaaatgaaaaatgtgatagagagcctcaacagcagacttaagcagaagaactaatctgcaaactcaaaattaagaaggtgctgtcactcccagttgccaagtcaagccccgtcgaaggaaaagcatgcatagaaccaagcacagccaaaatttctttcccaggatcagcacctccttctgaggctgcagacaaagactgtcaagggaccccattactccctgttgaagtctcagagctcatgggtgtagcttctttggtgtcaggggctctggatgctaagccagtagagaatcctgaagatcctagccaacggattaataaaaactggaagaaggcaattgtgacatggcaggaacaaactgagagaatatttatattttgaagtagatggatccaaacaaagaaatgtgaataagatcaaggagtttggctaggggtctgagagacactgtcagaccaacctgcatttgaaatgggccagtgtctgagtcatgacaacataaaggtaaaggtgccctgaatgtgcccctagtccctgggtctgctctcgtcacctcttgtcacttcaggaagcaacagccaggagtgaaacatgtaacctgaggtgggaggaaggaatttttcagaagctcttcctggacaaggtgagtcctcatgaactgatcctgacccctatgaacccataccctatgagctcaacctcctagatgaggagcgttccacgaataagacccatatgttaagatcctggagcctgagggatcaggtggcctgatggggcagacagttctaagttgcctcctgttttggccaatcttctgggaagcataggtacctggaagggtttattgagatctgaagaagaaggcatcaatgtccaggagagccttactttcatcatgggtagcccaaacagtcagccctcaaaataacttctaaaacaaccagactattcagataagatgactgattgctcttgccacctaacctctgaggtcctggttgaatagtccgtcgtttcctaccaggaggccctgggaggtccaaagacattttccccctggcactggcgacctatacctggtttctatggaggctctggagaccctgatgggcagttgatccacatcttctgggtcccccaatccctccagtgaaagatgaccccttctgggatagcccaggtgaccccatgcagggtggcctaatattgaggggagagtcaagaaccaattcctggatcataccataaagcctgtggtggccaaaaagaaaatgaacctttcccacctcctccactctgaggggccagaggaagtctctctggagtaggacccctaaatggatgaagaaattctggtgggatcattgttagagttggtgggcatcatcaccaataagcatctctttcatgaaagtactggtggtggcataagtgggggcagtgaagatttttcatgaaggtcctggacatgggggatgctgtgaccccaagcctcatgatgtccctggtcactgaggccatgaccatcaaggtctgccctctcgtgagcactctggccatgatggccctgggccactgaggtcaagatggaagctacagccatgaaggagacagatcaacctgctctgtttgctgacatttgatgataaagggcaatgccactatgagaacaattacgtcttttaccacctgagtgtcaaagtcc

SEQ ID NO: 836 - DNA, 4335 bp, Homo Sapiens
attctgatgtcaccgcttcctaatgagaagctagaaaatgcaattctagagtgatacacctttaagtcttgaagaatgaagatgaaatattccaaactatgctgcacaagaggatgtgaacagaaacatctggacggagaagatcttttttatattcagccatgccaattgacctactaccctctccatagccaaaggaatgcccaaatttccacagaaaggcatttttatgtcttacctcaaatggtcccatggaattaggctctcaggccctggccatcacggcactatctgtgtaaggaacttctgcaaagccttcctggctccttgatggattggctttttggcttatgcctgtaatcctaccactttgggaagctgaggcaggaggattgcttgagcccaggagtgcaagaccaacctgagcaacattgtagaacgtcatctctgcaaaaacaaacaaacaaacaaaaattagctgggacaggacagtccagagagaaccaacagcctttgcctgagctctgctccagagctcctccagccccgtgatcaggcactaactataacaactgaaccgatggaagtaaatcctaccccagcggggcactggcaggattaaagcaggtagtggatagcgtcttgcacagtaccatatacagagtaggatctcctacacgtggtaggattcttgacttgaatagaaacagaacccacatagcacagcaataagaaaaataagattctgcagacaccaatgctagtctcagggctgccactaactaggtatgtgactttgaccatgccccttcacctcctgtccgtgattttctcgcgtgtaaaatgaggcactattgtttagatttctcaagggcttccagctgtaacattctacagtcctgtgcattgctggaattgcaggggaacaggggagggagggtaaacctcacatgttcatgttttaaaatttcaaatgaagaaagttgttgttttctcctcttcccttctccccagtggtagcaaacaagcaataaatatggaaatcctaaaagccagagaaaatagtgagtgttctccattttgctgacaaagtacacagaggctgcgtcacaaaatgaatgtgcttatccctcttgtgtgctgcatgaattcctcccggcccgagcatggctggaccactcacaggacagctgtcctttgttctgtcagtacagggtcccctgcttgtgtgctgaccagcgcagcactgggtgactactgcagagtgaaggtgtgtgttccttctccagggagccccgaacagatggaatccatgcttagtgcagtgactggaaggaggtagaaacaatgcaggtgaattgggagggcagtgccgggagacagcggaagaaaagagaaaaacaaaggcaaggtagagcattccagctgcaggcagccaaagcctctcctgccaagggacaggtagctggttttcaaaattgtgcagacatactcagtaattgctctgcaccatcttgtctgccttttaagcacaagcgaggattgcatctgactcccattaccagcaaatgtcccaggaaggaccttaagtaataagagccttttgaagctgatcttcagaagcctcttcccaagatggcacctgggaggaggtgtggttgtttagcggctctgtcagccccggacgcacaagttgcttataccctgcgcagctgtctattatgaagaagctcatccctgtggacctttctcttgaatgcctactatgagtcactcagcaagagaggcacccagctccctcaaggtctgcagtgcctcggaggcccacttccctccatgacacagtctctgaacatattattcctcacggatgatcaccttcttaactccatccagacgtgtgcctctgtctcactatttagcgttgtcctagaaaatactgagtaattgtttcatgcgtatacatcatgtttcctcaagtagaatctacctttatacaatcaaaagtgtcagattgatggatgagtagcagaacaagaaccctcctcctatggctgttggggtgcaagtacccatttgcctattggaactgccttagggaagatacggttaaacacagaccccaccccgcaagttattctattgaggaaaagtggaaataaggtgagtgctactacccaaccacccaacccacacctctgttacaatactggctttttgacaaggaagcattcattctttctggcaaaacattgtccactcttagcagttcttccacggatatcagacctatatgccagtggcaacacagtaagtcagtagcattctataagcactcgttcaaccatgttttcggcgtggtttctatgtgtcagtcattatcccaagcggtggccaaggagaagctacagaagcagattcgaccaggccctttctttgaatagtctgtggtcccatgagggaggcaggtgagaatcaaggctctgtgataactgttccaagggagatacacacagagcatgtggcatgctaagctcctcttggggtaattgcaatgtttgccttctttcctttgaggacttaagtgtgaagcctgtgcacctggaatgggaggggacagggattctcataagaacctttatgccatttgtatagcagttaacagactgacaagaatttcaaaatagcatcagacgaggcgatgagcataggggtccttagaaatatttgcttgttttatggtcagaggcctgcaggaagcagctaataactgatctcttcccatagcccctaatgtcctctccgtttcaatcatggaccagagtatagtgtgacatttcccatattattgatttgagttgttatttatttcttttattgccatataactgtttacacccttggctagaatttaagatgccggaagacaagatagtgccttgttcccctgcctccactagcacagcacctgactcacagtaggcaatcaatgcaccgattaattaagtcctccttctgctgagggcccatcgtcctttggctgtcccagagagctaacacctgtccccgggaccaccctagacacaatggcacgcagacgaacgagcctccttcgtctaccttccctccgcgagcagcatcaaggacctgagaggcaaactcaaggtgaattttaaaacaccttcagtggtggttgcagagcaaacctgcctgcaagaaaaggattttttccatctttcttcagcgccactggagcggctccttccattgaaaatacagggatttgtgctgcatgattgtgcagggagtgggggccgagtccacgccagtcatcaagggctcagcatgctcagaagggctttgtgctccaggcactccagcagcctggcttggccttagcacatcccccttcctgaagaggccacagtacaaccacttcagcaagtgacttttcagtaatggctctgtgtgcccaaaagggaaatcaatgtgacggttagaaaagtttctttttttcttccagtcctgtgctgtccccaaaatatcagaataaggtttgttatctgggcaaaggaacaagcgcaagattttcttttatgttgggtgaggagctaaaggactaaacatttttgaaaacctatgatgtaccagagactgtctcacatcctgccctatttaatgttaccaggagatcgttggtaaggtgttacccccatcttaaagaggaggggaccaagattcagggatgcttcacaagctaataactaaaacttaattctaaagtgtgtggggtgcgtgtgtgtgtgtgcatgtgtgtgcatgcatgtgtgcatgtgtgtctggtctgatgtcttagtgttcatatccatgagcatcaggagagcttccacttcacccatgtttcaaactctagagaggctgctccccctgctgagtagcctggtcgtggccgtggctgggtgatggctgtttggatgctctcagaaatgtcgtaagcagttcacttattattcagggaaacatccaacaaagtgatggcttctttccttgctatcactatctactgccagctgttcacttgaattgaaggatatgagggactgaatgctgaattcacgaatgcagctaaccgcccccctccagaccccagaggagccattaggatgagtgtttatggagcagcactgcctggaaatgccaaggcccagtaaggaatgagaggtgaacggagaaatacacgcgtccctggatccctccctgggtggggaagactgtgtcgtgggacagggggcttcaaatctatgggaaaacacagcaaatacacttctagttctt

SEQ ID NO: 837 - DNA, 1767 bp, Homo Sapiens
gcgagaggcattgaggcacttgagaaacaggtgaggcagagcaggagggaggacagggcagacgccggcggccaggcaggatatatcaccgttccactgccagggtcataaggggtggggttccaaaagggtggcttgtccagagaggccagcattccagtgacagggactgttgccatctcccattcccggcttcctcttccagaccttattgtggtgtggcttcatttctcagagaagagccatgaaaagatacaagcatcttctctgacgtgggtccgctggtctcctgcgggacaaagagctcctgtggggctcgtgtcctcgtctgcagtgtgttcatcttgatcctagaaaagaggctgttcaggatggggaggatatttcaattgctccgggactgaagaatctcctcacgtgggccaggccttcacacacccaaagcggaaccgcgtcggcgaaaaggattgacaaccggtctcatgacccaggcagagaggcagaaacaggctcaccaaagacaggccgccatgcgagaaacagctttgtggtgcacagggcacattcggccaaggacacacacgcacacgggcacacacacacaaaccgacagagagagggaaagaaacacacagagactgagagacagagagagaagagagaatgggagacacacacacatacacacacagacacacacacagagtcttatagcaaaggcattgaaagacacacacccaggcaacccctgaggctgtggggttctgctttcgacgagaacgacccttcggtgagagagcaccccaggggcacgcaggccgtcctgtcctcgagatcaccgcgtcacgacttttggggagactcacccccaccaacaccgtccagagaggcctgagggagggattccatgctgccttctccggactctgcgtcgggtttcctcaccctgtttggccctttgtgactcttggcatccggagactttcccctcgacccagtggagtcgtcaggccggagcctcagagccttgacacccaagcactgccacggaagtctccccctttgccaagcctcggggactggtttctaagacaaccgtgggaaccactgtgacgggagaaaccgcttgtgcttcgcgcatgcgcattggctgggccgactcctcccctcctggcagtcaggctgcgtccccttcaaagaacgccaccgctgagaactgaccctcacatctcccttcctgaatttctttagggaaagcaacaaccatccctgtaagccatgggttttcatgcggaggaaggagagggctagttgtctgagagggaaactgcttaaggctgcagactaggaaatgggattccaggtttaagatagctcctttctggacctcagtccttcacctagtcacctagtcacagggtggatcgcctctaaggatacttagtggaaaaggaaccaaattcgggatggttctccttgctttaagccttgatgggagacggggaggccaacccttctctgcagaccgtgatcctcactagacagaggagctccaaacctgcccatctcatcccatgcacctacggtgcctggcctggctccaaactcccgaaaggaactattttacaggtgccaaaaaggggacagtgttgataataataataaaatgaaacaatctgattggggcattgctggatcagaaaatgtgtgacctttttaaagttaaattgttaaaaaattttaactattaaacattttaaatattaa

SEQ ID NO: 838 - DNA, 1676 bp, Homo Sapiens
atcccggcccctcctccgccagccgcgtcctcccgggcttggtgaggaactgttcctggaggagccgcgggacgccaaaaccagccaatgggaagcggcgattcgcggagattggcactgatgatgggaagcaatgataaggaaactaaactggattaagtgctatcatcttggaggtgcaaaggcaaacaaggagaaagaagtgattgaagagcacttcagaaagcttggtacattcaaatcagcagggcttgattactcgcatcccaggacacttaaggaattggcaaatataattgcaagaccaccagcctttattttagaaaatgaaggttggacagaagaaggtcctgacaagtaaaatcagcagatggagtacctgttttttaaaagagggaaaaggacagctgtagtaattatagactattcagtttatcttggatacctgggaagatacaagagcaaatcatcaaacaatcaatttgcaaccacctagaagagtacaagctactgggtcgtaatcaacgtgattttgtgaagtgcaaattatgccacaccaatttaattttatctatgatagagtgatgagcctggcagaagaggggaaagcaatatctacaactggacttcaataaggaatattgatctcagcgttactttgaccattaatgaattatgatggcaataagcaaagattcgcacctctagcctccggggagcttaatcttctgctacaacatttgcatttggtgtctctctactgctcaggctggagtgcagtggtgcgatcatagctcactgcagcctcgacttcctgggctcaggtgaccctctcgcctgaaaccatattccccctcaagtagctgagactacaggcagtgtttaaggaggatccaggaatactttaagtgacgccagcgttagtgttgcctcctcagaagactgctttcaggggaacagtatacatctgccctgtaaattctggatggtaaatatgacaaaaactctctccttgacccagctctagtgagactgctctaagccctcttctcaacatggctcaaccttgggcttcagtgtacattttgttgggcctgcattgctcagttttagcaagagtccagttaagtgaaagagaatctcacagctttgatatcagattcttccatatctaaacaaattcctcatcccctaccttcaatatctgatcactctgccctgtttgcaccaagaatctaccctcacccttgatgtctcctcttaataattttccatccaccaatctctccccactcttcaaacctgctccttggctataagtccctaccccttcttgtcttatttgcaatagagctcagttctacactggggtctctttttcctgattgcaatagttcctgaataaaatctgtttttaccactttatccactgtctagctctggttttctttaccagaagtcacagttaacacatgcgaaaacccatttgcaaaacaaatccacaggactcggtccatgtgctgtgaagtctttgattaagggcttaaaaacaatgaaaagtaataaacggatctgaatacaattcaggcaataaaacactttcattggttttcatactcagcaaaagtatttttactgattaaaagataaataatcctcactctactaactcaatg

SEQ ID NO: 839 - DNA, 2204 bp, Homo Sapiens
ttaacagtatggttaactgttttcaattaaattatgtcatccacatccttcagttcttaatttttattcatctctaggtcctcatattttgaaagaccacctgtgctatatgtatgatctgcttgtccctgtcaaaactcaggttgaaattttgttcccgatgtggtggtgttgggaggtggagtctcgtgggaggtattttgctaaatttcttgaggtacagaataaatgaatgtcatcctcagcgtaccaacagtttgaaaaaatgagaagaaaaatggcagcagtaaaagaccccattatgaacacaggctagtaactttcttaatccaaaatttcaatttgttataatgacaagtacattttattcatgacaaatgtaaagtattgaaagagaaataatcaaatagtttatagcctatactcctctatttcctgaggatgctggctttgtaatttttgatagtcaagaaaacgatcataaacctaatacaatgcttttgtttgtgcaaatattctgtcacatttcacttggaatatggagtataattttgaccattgctttttgggtgacccatgataaagatataaattgtctagaaaggcaaatagattatataaatgggattctatataaaccaaacacaaacttctggaaagttgaagagtaaacgagatgattaaacatcacaaattaacatggtgcttgtactcaataaacgtagctattataattatttaaaaattaataaagagttaatactatactctttataaaatgaaacaccaggacaagaaaataatgcaaaggatagcttaactgtgaaaaataatttaatattaaataatgctgaaagttgttaatcccaaccaatacagtatatatctttttagtgtctcttcacataaatcttatataatactattgcacaagtttgttaaaagataaaaaactactaaaaataaatctgtgtgtgatttttagaagactacatatttatgtgttccacatattgaatcaattttcaaacttcaaatttttagagtgcttttggagtggaacacatcctgagtgtgccctttcagtccagtctcttactgatgctctcctaatggcattcacacatgcatacagctcgccgccctagaagcggcctgctttaagattgaaaatatgactgagagtggccaaaatacaactctctgtgagtgatccggttatgtcctaattaactttcaatgtgtcaaattcaagtgatagaaaatggccaaggaattaaggaggtaagctgagattttacacttttctcaattttaagcttgttattaagtggaaaataaagactacacgcttttattgctttaaaaaagacaaaaaatgacatttaatgacattcttgaagaagatgaacatttgtaattgcaaatggaactccttggaaaataagcgttcgttgcttttgttgcacagatctttcttctccagttcaacatgaatctcgaacttttaaaatccagatgggcagcacatgacaaatatgggtaaactcagccaatgaaacaaaagtatttgtttccaccctatttaatgtgttacttcctccaagtaacaatagaaaactaaaacttcttgaaaataaataaaataccaattaaataccaattattttaaaagtggtgataaattccaagaaaaatatgattatattcattgttattataccttcaatcatatttaaagggcattttggaactggataaattaaaatgtccaactaaaagtatcttagttaaccattctgtttccagaaagaacataaataaatatatctcacagcaaattcttaagctttatataactttattttcatcactttttatctctaggatttaacaaagagctgctgaaggtttcactgatgtggaagcagtgaatttatatttcagaaggaatacacagataagtgatggattcagagaatttataagcttaaaaatgaattttaaaaatataaataaaatgatatctgctttgtgatcaaatccatttgactccatgttattgttttaatgccctagtggagctacttctctgcacagctttctgggagtccagagactgctctatacattggaaaatatgatgaatgtgttcaagaggggcgtgacaattgttccgtacacagatttttccaagcattctc

SEQ ID NO: 840 - DNA, 10546 bp, Homo Sapiens
agagccgctggtgcttcccaggccgtcgcgctcctggccgcgcacccagccagggacccagaggccctcagccccgggctctgcgcgtacactgagggcgcggcgcagcaggacagcaagataaggaagcagagactgaagggaggaatccccgctttccggggatgatggcgttcgagttgggtctgtgagggatgaaataggagttggccagagggagagagggactctaggcctcgagaagagcacgtgcagaggttccgtgacacgaaaacgccaggtgggtgcggggctgggaggacaggaggcagaagggtttacggctccacatggtcgccgaaattttaggtccctgagagtaaaggggtgcagctgatttcatctagaaagcccctggccgggaggagagaacgagcttgcttgcctggggttgcaaaggagtgggtagctgagacggccagcaccccagcatcctgactcagggccagacgcttcaccccattgggcggcgtctggaggagcagacacatctcttgtgggtaccctcgaaagtgaatcatgggtcgcagggaactgtggtcaaaccgtctctagctagatgctagagagccagctctgcaggctcaggctactgtgagacacgaaaggagggactcgctgggcacagcctcaccctggggcatgccagcaggccctgccctctgagtgttggcagacttgaacatccctagggaacgagagaagttgggcaacgatgggagagcagtgcaggccctggaggtgacgagtctgttgagattctgatggggatgggtcagaggacgtagaaagcagtgaaggcctagacgcccccaggtcagtgtagcctgctctgcttccagtgagctgggctcagtcccccacatgtcattgtcttagacgcccatggcctttgcacaggccgagcctgatgtttggaacatcgtcgcctctagggggcctggctcctaatcatgcatcacctcctccaggagaactttcctgcccctacactgagttcaagcttctcagacaccagccccagttgagttcgagttataaccgtcaccagttatcacaccatcctgtaatctgtgcggtgccccttagggcaggacctgggtcctagatgtctctgtacctctagccccaaaccaggcctgacctgtctcttgaaggagtatttgtgttgaagatgggtggtaacgttcagcaaaagccatgcccaggagacaggcacagtacccatggagacccagggccagctgatgacagtgatgaattccctttagaactggcggactcttgggtgcttggagacactatataaataaggaactctggctgtgtgcatgggagagtatattaacagggcttggcctggctgtgaggtgcagagatgccgtttctctcaggtaaggagccatattggggcaggggtttcctaatccttttttgactcacaaaatacacctaggaaatgttaaataaatagtcatttttgagtagtatatgataaagaagtgattgattttgactaaaaatattcatgttctatttttagaatatgaaagattgtattataaagatcacttgaaataaaattttagataatatatggagacaaatttctgctttttacatttaacttgctgtttaatgtatctcaaattatttatgtaagagatatatgatttgaccaataaatataaaaaaatgttataccataatctggggacctaaagtacttcactttttttgttctgttttgtttttgagacagggtctctctctgttgcccaggctggagtgcagtggcccaatcatggctcactgcagcctcatcctcctgggattaaatgattcttccacctcagtctcccgagtagctgagactacaggcacatgccactatcgctggttttgttgttgttttgttttgttttgttttttgagacagagtctctgttacccaggctggagtgcagtggcacaatctcggttcattgcaaccgcctcctcccgggttcaagcgattctcatgcatccgccttccgaataggtgggattacaggcatgcgtcaccacacccagctaatttttgtacttttagtagagacagggtttcaccatgttggccaggctgatctccagctcctgacctcaagtgatccacccgcctcaagcctcccaaagtgctgggactacaggtgtgagtcaccgtgcccagccgcccagctcattttaaatttttcttgtaaagacaaggtctcactatgttgcccaggctggtctctaattcctgggctcaagcaatcctcctgccttggcatcccaagtgctagcattacaggcatgagctactgcacctggccctaaagtacttaaaatgtaatttaaaatttgcacctgggaggccagacacggtggctcacacctgtaatcccagcactttgggaggccaaggcaggtggatcacaaggtcaggagttcaagaccagcctggccagcatagtgaaaccccatctctactaaaaatacccaaaaaaaagccaggcttggtggtgggcgtctgtaatcccaactactcaggaggctaaggcagagaattgcttgaatccgggaggcagaggttgcaatgagctgagatcgcaccactgcactccagcctggtgacagagcgagactccatctcaaaaaaaaaaaaaaaaaaaaaaaaaaaagtgcacctgggttaggcatctcccagaagccagagtgattgttcaaaaacttaaatcaggccaggcacggtgtctcacacctgtaatcccagcactttgggaggccacggtgggcagatcacctgaggtcgggactttgagaccagcctgaccaacatggagaaaccccgtctctactaaaaatacaaaaattatccaggcatggtggcgcacgcctgtaatcccagctacttgggaggctgaggcaggagaatcacttgaacccaggaagcagaggtttcagtgagccaagattgcgccactgcactccagcctgagcaacagaacaagactgtctcaaaaacaaaaacaaaaatcttaagtcatctcaagttcctcttgcttaaaacccttgaaaggctctccagcatagtcaaagcaaataccaaaccctttaccatggccttcaaggccctgcttgatctggcccctgcccacatcactgatcttacctcttcctactctttagccttattcactgcactgaaatcccactgccaagcttagccccaccttggaggctttgccctggctgcacccctctcctagtgctcttcctccacaacttttagaggctagctcctacataccaggcagatttcagaagacctttcctgtcatccaatctgaaaaagctcccatcccaatcagcgtctatcacatcacccttgttcttcctttcagagcacctaatactcccagaaagaatcacatttctgtgtttgctagttgtttattatgtctcttctaccaggctgggaacttcaggaaagccaggaccaagtcaatcttgatctaggctctgtcttcagcatctagaaccaggcttggcaccaactgagtaggtaatccgtaaataaattgctgttgctgtgtatcaaaaagaaaaaaccaaagtttgcatggtccagtgcttagaagttttgaaataaaaaatgtagctattttttggctgggtatagtggctcacgcctgtaatcccagcactttgggagtccgaggcggtggatcacctgaagtcaggagttcgagaccagcctggccgacatagtgaaaccacgtctctactaaaaatacaaaaattagccgggagtggtggcaggtgcctataatcctagctgcttgggaggctgagcggggagaatcacttgaacctgggaggcagaagtggcagtgagctgagatcgtgccattgcactccagcctgggcgaaagagcaagactcagtttaaaaaaaaaaaaagtagctattttttaaattggaaaaccaatcacatgcacatagcaaagaattgaaatagtacaaaagtgagcctgtttgcctcacaccttcatattgatcaggataggacaggctggtctgtggttacagtgatttctttttttttttttttcttccagagatggagtctcgctctgtctcccagtctggagtgcagtggcatgatcttggcaatctgggctcactgcaacctccgcctcccagattcaagcaattctcctgcctcagcctcccgagtagctgggactacaggcacacgctgccacacctggctaattttttgtattttagtagagacagggtttcaccacgttgcccaggctggtctcaaactcctgagctcaggcaatctgctcgcctcagcctcccaaagtgctaggattacaggcgtgagccaccgcacctggcagtacagtgatttctaatattgcccatgactgttggctgaactcaactggtgattcttactttgaatggcttatgtgactgcgatcacaccaggactggagttacctgaagactcagctgggcaggttactgttgatggctcactcatttggctggcaggagatgccatctattggctagagggtcggagctgcaaaccaaagcacctacatgtggccccttcacatggcttaggtttctcagaacatggtggctagattctgagagggaggcatcccaaaacatgcatccaacagtatgaaagctgccagtctcttacggtttgaccctgaaattagaacacatcacttcctctgcattctattaaccaaagcagtcacggaccagcccagattgaaggagaggggacataggccccagccttcaatgaaaggaatgtcaagccaggcacgatggctcacacctgtaatcccagcactttgggaggtcaaggcgggcggatcatctgaggtcaggagtttgagaccagcctgactaacgtggtgaaaccccgtctctactaaaaatacaaaaattagccggatgtggtggcgcacgcctgtaatcccagctattcaggaggctgaggcaggagaatcgcttgaacccaggaggtggagtttgcagtgagccgagattgtgccattgcattccagcctgggtgacagaatgagactgtctcaaaaaaaaattaaaaaaggaatgtcaaaaaagtctggccatctttaatccaccacatgtggatactaaataaaactccaaatctcagtcgcttaaaacaacaaaggcttatttcttactcatcccacattagacaatgatggtgtgctgttctcccccagcagggacttaaatccttctgacatcaccataatctcagttatttgattccaactgctcagattggggtaggggagagggaaaagattgacactaacacttaattgccttggactgaagtgatacattcttctgcccaattccgactggtgacatcacatctactaggaaggttgagaaatgtagtctttccatagtccctggaaaagagaaatgggtgtggatacatcactgtggctaacacacaccactttcccagtctcctcctctaaaagcatcaccactaacactacagagtgtatacttccagaaatatttatgcatatacgacacataaaacacaaaggggaacaggcacagtggctcacgcctgtaatccctgcactttgggatgctgaggcgagcagatcacttgagcccaggagtctgagactagcctgggcaacatggcgaaaccctgtctcttctaaaaatacaaaatttagccaggcatggtggcacatgcctgtagtcccagctactccagaggctggggtgggaggatcacttgagctcaggaggcagaggttgcattgagctgtgaccatgccactgcactcagcctgggtgacagagtgagaccttgtctaaaacaaaaaaaacccacagaaaaagagtagcatttacacacttctacactttgcttcttcctctttttttttttttttttttggacagagtctcactctgctctccaggctagagtgcgatggcacaatcatagctcattgtaacctcaaactcctgggctcaaacaatcctcccacctcagcctcctgagactaaagatatgagccaccacacctggccaagcaaaggatttaagtagacatttcttcaggccagacacggtggctcatgcctgtaatcccagcacactgggaggccaaggcgggcagatcacctgaggtcaggagctgaagaccagcctggccaacatagtgaaacaccatatctactaaaaatacaaaaattagctgggtgtggtggcacttgcctgtagtcccagctacttaggaggctgaggcaggagaatcgcttgaacccgggaggcagaggttgcagtgagcagcgatcacatcactgcactccagcctgggcgatggattgagacactgtctcaaaaataaataaatagacatttcttcaaagtaaatatacaaatggccaataagcatgtgaaaaattgctcaacatcatcagtagggaagtgcaaataaaaaaccacaatgagctagcactttatatctactgagatggctgtaatttttttaaaataaaataacagtgtcagggaggaagtggagaaaatagaaccctcatgcattgctggtgggaatggctggtggtgcagctgatgtggaaaatagtttggaagtttctcaaaaggttaaacgtacaaccatcatatgatccagcaattccattcctgggttcatatccacaagatcaaaagaatcaaaagcagggacttgaacagatatttgtatgctgctatagtttggatgtttgtaccctgcaaatctcatgttgaaataggatccccagtattaggcctaatgggaggtgcttgggtcatgggggcagaaaccttatgaagacataatgccctccctgggtgggcaggagtggtgagttcttactttatcagttcccagagaactgattgtttaaaaagggcctggaggcctggagcagtggctcactcctgtaatcccagcactttgggaggctgaggcgggtggatcacttgaggtcaggagttcgagaccagcctggccaacatggtgaaaccccatctctactaaaaatacaaaaaaataaattttaaaaaaatcagccaggtgtggtggcaagtgcatgtagtcccagctacttgggaggctgaggcatgagaatcgcttgaacccaggaggtggaggttgcagtgagccaagatcacgctactgtactccagcctgggtgacagagggagactctgtctcagaaaaaaacaaaaaaagggcctggccctcccatctcactctctcttgcttcccctcttgtcatgtgatctctgcacaccctggccccccttcaccttccacagtgagtggaagcagcctgaggcctcaccagaagcagatgctagtggcatgcttcttgtacaacctgcagaactgtgaatcaaataaacctcttttctttataaattacccagcctcaggaatcagagtaagacatacacccatgttcatagcagcattattcacaatatccaaaaggtggaaacaatgtaagtgtccatcaacagatgaattgataagcaaaatgagtgtgtacatagaacaaaatattattcagccataaaaaagcatgaaattctgatacatacaacatggatgaaacttgaaaacatgctaagtgaaataagttagacataaaaggacagatttataaatccacttgtataaaatatacagaatagccaggctcagtggctcatgcctgttattccaacactttgggaggccgagacaggtggatcacctgaggtcaggagttcaagaccagcctggccaacatggtgaaaatccatctctacttaaaatacaaaaattagccaggtgtgttggtaggcacctgtagtcccagctactagggaggctgaggcaggagaattgcttgaacccagtaggcggaagttgcagtaaaccaagatcacaccattacactccagcctgggcaatggagggatacttgttctccaaaaaatagtaataataaaaataaaacaaggctgggcgcagtggctcacgcctgtaatctcagcactttgggaggccgaggtgggcagatcatgaggtcaggagttcgagaccagcctggccaacatggtgaaaccctgtccctatgaaaaatacaaaaattagccaggcatggtgatgcacgcctataatcccagctactcaggaggctgagacaggagaatcgcttgaccctgggaggcagaggttgcagtgagccgagatggtgccattgcactccagcctgggcgacagagcgagactccatctcaaaaaaaaaaaaagaaattaaaattaaaaaaaataaaatatatagaatagacaaactaatggagacagaaagtagactagcggttaccagggcttagggggaaaagaggaacgaggaaatattgcttaatgtttacagaatttctgtttggggtgatgaaaaagttttagaaatagtagtggccaggcacagtggctcatgcctataatcctagcacttggggatgctgaggtgggtggatcacttgaacccacgagtttgagagcagcctgggcaacacaggaaaaccccatatctacaaaatatataaaaattagtgggggcgtggtggcatgcgcctgtcatcccagctacttgagaggctgaagcaggagaatcacttgagcccaggaggtcgagtctgcagtgagccatggctatactactgtactctagcctggatgacagagtgagactccgtctcttaaaaataaaaaattaaagtatggttaaaaaggcaatttttgtgttacttatgttttaccacaattttttttttaaacctcactcaaaaaagaatgacatcatcttaggaggccgggcgcagtggctcacacctgtaatcccagcactttaggaggccaaggcgggtggattgcctgagtttaggagttcaagaccagcctgaccaacatggtgaaagcccgtctctactaaaaatacaaaaattagctgggcatggtggcacacgcctgtagtcccagctacttgggaggctgagacaggagaatcacttgaactcaggaggcggaagttgcagtgagtcgagatcgcaccactgcactctggcctgggcaacagtggaagactccatctcaaaacaaaaacaaaaaacaaacaaacaaaagcaaagtaggccgggcgtggtggctcatgcctgtaatcccagcactttgggaggcccaggtgggtggatcacctgaagtcaggaattcgagaccaacctggccaacatggtgaaaccccatccctactaaaaatacaaaattagccgggcatggtggtgcgctcctgtaatcccagccactcgggaggctgaggcaggagaattgcttaaatccaggaggcaaaggttgcagtgagccaagatcgctccactgcactccagcctgggcgacaagagtgagactctgtctcaaaaaacaaaaacaaaaaccagaaaaacaaagtagtaaaatccagaagatagaacttctacaaatcaaccaaactgaaaacgcaatataaaaatgagcaatggctttcatcatcagaagagaaagaaaactcactgatcttgcatgcccccaaaaaaagaaaggaaaataaaagttaaccacaaaaaattataatgtaagttaaagtacaaatgaggggtcatttttttactcatcatattggcaaaagttaagacattgcaagatataatcatgcactgcataaggatgttttagtcagcaacagacttcagataagacagcagtcccataagattataagactgtatttttactataccttttctatgttaagatacacaaatacaaaccattgtgttacagttgcctacagtattcagtgtagtacatgctgtacaggtttatagcctgggagcaaaaggttatatcatatagccaaggtgtgtgtggtgggctataccctctgtttgtgtaagtacactgtgatgttcacacaaggatgaaatcacctaacgatgcatttctcagtgcgtatcctggttgttaagtgatccatggctatattcagagttggtgagagcgtggggaaaagggagtccattgttcgttgctggtgggagtgtaaattggtttaatctcttaggacaatttggccatctacacactgatatatatgcacatccttggacccagcagttgcactccagtgtgcaacaggatgaatggttacagatatcatggtacattcataagacagaatccaatgcaattcaaagaaggagctggatctatgtgtcctgacattgtaagtatatgtctgaaatacttcataatacttcttaaaacccgacaggtttatttttgtttctaatgttatattctgt

SEQ ID NO: 841 - DNA, 2604 bp, Homo Sapiens
gacattcggagctgctcttcagggttctgggcacgtcgcatattgcgccccagccttctcagcagccaggagctgggaggtggaggggcctgtggtctggccgccacctagcaggcctgcatggccacctccagccgggtgcaggctggctggggtggggctgcccttgaccttgggctctccctcctccgccagatcctcaggcgctggctcagcctcccacggcctgggggagcctctgtctgctccttccagccgttcaaggacgaggcttccgaaagactcactgttcctgtgtggggaactgaggctgtgtgaaggctggatgaaccgctgctgtggcctgagtcctccggaggctgagagcaaacggctgcactaggaacccagcagtcagaccggcccccaccctggagtgaacacatcgccactgccaggcatcgcagggaggattaccccaatggcacctggctgggcgacgagaacaaccccgagatgcgggtgcactgcgccatcatcccctccgacatgctgcacatcagcaccaactgccgcacggccgaggagatggtgctcacgctgctggactacctcttccaccgcgaggtgcaggctgtgtccagcctctcggggcagggcaagcacgggaagaagcagctggacccgctcaccatctatggcatccggtagccgatgatgagcaccccacctcctgccagagagctcctgcagccacagctgcagccgcaggccctgcactacgcgctggccaacgtgcagcaggtgcagatccaccagatcggagaagacggacaggtgcaagtaggacacctccacatcgccaaggtgccacagggggagcaagtccagatcacgcaggacagcgagagcccgtgttctggtactacgtgaaggaggtcctcaacaagcacgagctgcaagcgcttctactccctgcgccacatcgcctcagacgtgggccggggccgcacctggctgcgctgtgccctcaacgaacactccctggagcgctacctgcacatgctcctggccgaccgctgcaggctcagtactttttatgaagactggtcttttgtgatggatgaagagaggtccagtatgcttcctaccatggcagcaggtccgaactccatactctttgcgattaacattgacaacaaggatttgaacgggcagagtaagtttgctcccaccgtttcagacctcttaaaggagtcaacgcagaatgtgaccttgctgaaggagtccacgcaaggagtgagcagcgtgttcagggagatcacagcctcctctgccatctccatcctcatcaaacctgaacaggagaccgaccccttgcccgtcgtgtccaggaatgtcagtgctgatgccaaatgcaaaaaggagcggaagaagaaaaagcaagtgaccaacattatctcatttgatgatgaggaagatgagcagaactctggggacatgtttaaaaagacacctggggcaggggagagctcagaggacaactccgaccactcctctgtcaatatcatgtccgcctttgaaagccccttcgggccaaactccaatggaagtcagagcagcaactcgtggaaaattgattccctgtctttgaacagggagtttgggtaccagaagcttgatgtgaaaagcatcgatgatgaagatgtggatgaaaacgaagatgacgtgtatggaaactcatcaggacggaagcacaggggccactcagagtcgcccgagaagtgctgccatggccacgactgttgttacactcgagctgaggaggccggctgcagccccaagacagagcgctactcctggcagtgcgtcaatcagagcgtcctgtgcgatgagtccccagcagcaccatgccacccaccccgagtatcccctgggcaccctggcatagccagatgacttccgtgcccctgttgcaataaccactgcttccaagtctctgtagaccaccccttgggtatatctcatgtaagtgatatttattttatttatattttttgagtcagagtctcactctgtcacccaggctagagtgtgctgacgtgatcttggctcactacaacctctgtctcctgggttcaagcgattctcatgcctcagcctcccaagtggctaggactacagacatgcaccatcacgcccagctaatttttgtatgtttttcagtagaggtggggtttcaccaagttggccgggctggtctcaaactccccacctcaagtggtctgcccgcctcggcctcccaaagtgctgggattacaggcatgagccatggtgtctggccctaatgtgagtgatctttaacactgagcacttgaaaaagaaaaccctgaagaaacctaattattcgatgtctggacgacaaggaagaagatagaaatggcatcagataataaacagtgtaaatgtttgtttatcagaaaggggctggtggtcgggacaagtaggaggatcgcttgagtccaggagtgcatctctacaaaaaagttaaaggattttttaacattggccaggcgtggtggcacacatctgtgatcccagctacttgggaggctgaggcaggag

SEQ ID NO: 842 - DNA, 1131 bp, Homo Sapiens
ttatatcaatccttcacatttctttgatttatgaaagaaaaaatgttgcaacatatagaagatcagaggaaggaaaggaggaagcagaagctagaaaaatctagattgtcttcatgagccagacagaggatggcagaagctggcccaagtctggagctggctgaagatgaggccaatctctttgcagcaaagcccccaaagcatgtggatcatgtggatggattttttcactttctgccttgtcatttagtctaacaactgagactcagatgagagctgagtaaaaggtctcagtcaggccacatgaaccacctccacctccactaattcaaggaagaagaggtgcaaaacccatgcccacctgtgtaaatgctgctgcaggtttgatagaaaatcatgctcagtcaccagctataggcaatacacgtgtctctgtgagctccatccccacacctcctccaccaccccttccatctcccctgtcaatgtcttcattaggagcttcagtgacttcaactgctctccaccaagacctctcccacctctgcctccacctccaaacactgccttgggaactccagcagtaccacctcctccagcgcctttccacattttccccagccatcttcacccagctcctcttccagctgctcctctacacagccctctctgccaggaattagtgctgtcccagttcatccatcccacaagacatccaaggctacctccagccccacactaccttctctggctccacttggtattcaaccatcatcatctgtcacagttgcagtcctgctcatcctctctctggctacatccaacttcacctactgctgtcccaagtccccaagctccatgaatgaccccaactcctccaacacaagttacgtctgcttatgagccgaagtgtcatctcccagctgtacctatagtctgggttgccaagagtgtacttctggaagcagtaaggaaaggtgttcggttacacaacgtagaagagcagggtgtaaagagagctcaccatgaagacattgaaaatgatgttgccaccgtcctgtcttgccatactgctgtggaatctagtgattcagaaaatgtttccaaatttgatgaagtagactggttgga

SEQ ID NO: 843 - DNA, 4661 bp, Homo Sapiens
cgcacgtacgcacggacgtcctcccgagggaggcgggaactcggttcgcgggcgcggagcggtcccggaccctcgaagccagttccttgcgtcagtgccgcggctctttaacccgaagggagattttttttttaaagccagaggccgttgacgctgggtagcctttggctggggttggttatgaactccgacacagcggtggtgcatacggaagggtggtagccgggacggttccggtccctgcgagcgtgtcccgggcgtctccgcggaagtttcacctgccgcgccgctcgatcgccgggacctcctgggtctctgctgtgcgtagaccagccgcgttcctttgggtggccgtggagcactaaagcggggcttattgtttgtttggttttggtttttttttttgttttttttttgctttttgtttttgaactgaggatctatcagaaataggctgaaaagaccgagtgaggaagaaactctttaacagctatttttggcatcttaaggtgattctcaggagttgctacgtatcagaatcaacggaggagtttttcaaagcagagatgccagggccagtccccagacctgaatcaggaagtgagggagagagccgacggagggggaaaagtcccttcagctgattcttatgtatgtcagtttggagagccacggatataaccaatactgcgtccttctgaggtcccactttaagtgtcctgggttgagctgggtgacaaatgcccttacaacaatggtagtagaagctttcaggccaagcgcagtggctcacgcctgtaatcccagcactttgggaggccgaggcgggcagatcacttgaggtcaggtcaggagttcgtgggcagcctggccaatatggtgaaaccccgtctctactaaaaatataaaaattagccgggtgtaatggcgtgcgcctgtaatccgagctactcaggaggctgaggcaggagaatggcttgaacccggcaggaggcggaggctgcagtgagccgagatagcgccactacactccagcctgggcgacagagcgaaactccgtctcaaaaaaaaaagaaaagctttcagaaagttgcctttttatttgaaaaaaaaaaaaaggtatttggaggattttatgtagtgcaacaactgttttagtgttaagatcatgaaatgctttggtctcctgttagtgttcccaagaaaggtgctgtaagtccttaaaccacgtgaaaactttttttttttttgagacctcctcgttctgtcgccctggctggagtgcagtggcgtcatcacatttcattgcagcctcgacttcccaggctcaagccgtgctcctcgcaattacctgggaccgtagatgcacgccaccatgacttagctgatcttttttttccctttgcctcgaagaggctggggtctcaccatgttgcccaggctgaaactcctgggcccgagcgattggcccgcctcagccgctggaaatgctagcattacaggcatgagccactgcgcccagcctcctgaaaactttttaaaatttattcaaaaatgtttcctgacctctttattgtcatagtgttttagagatacactgggattacaaaacagaggagctccctgcattcaaggggtttacaatctaatagagaaaaagattgagaatagatacatgccagggagtggtaagtgctgtgaagaaaagaataagtggggtaaaaggggttagaggtgattgaagaaggcccctgttgatcagatgaaggaacctgtcttggagaagagcaggagaggaacacataacaagtgcaaagggcctgagggaaacggattcttggcttgttagaggaggagtcagtgtggctggagtggcttgaacaagggagagaatagtaggacatgagataagagagttattaagggagccaggtcatgtacagaaatggtcttcaattttttttttaacttttgtgccctttgaaagaattttggaaggctgttttctttcctcaaacattgtaagttgactaaattttttcagaagtttaaatagttgcagagtttaatttgtgacattctgtaatactgacatttaaaaattatttttaatctaatagggaagtaaacactaaagtggcttaatactatccattttttaaagtatattaaaatgttatattttttaaacatggaaaagtattgggaatgttttaatgatatggctgggagtcttcccccttcccctaattatttcgagtaggcatgaatgcatataacattgctagaatgagataaggtcctgtatcaactccatttttcattgccacagtctttactgcattaaaaactatatatgtatacatgtatgtatctacacactcacatatatgatggagtaattcccttaaaactacccttacttttttatgtaccccttggaaaattttccttcactgaagtaccccaggagtactcataccctagccttaggaccactgagtcagataggaaggcttggatgggttttgagcaaagactcaaagcagaattgtgaaaagagtcactgtggctgcttcctagaggaatcacctgtaaatggtcagtggaataaggaagaccagttaaggggctaatagggtaataactcggttggttggatcaggttagaatctgtaaaggtggtgaaaaatatggagtataaatcataaacacttcttctcaaattcacttcaaaaaaataagctaatgaactgaatttctcaaccaaaagttttgcttccatgagttttcttaaccttttgatgcctgctacatttgcctttattaaaatctagaataaaagtgttgtttttgaaaactatataatttgtataggatggaaacagcccccatgaagttcactgtgtgctctgagaaggcagtgcctggagtataactcatgaaatatttaggatcattgaaacagacccagttacatccttgattttctgtgggagcccagaaatcttgcaggagaaactatgaaataagtccacagatgaggctgagatacgataatgcacaaacctgtctaatagactgcatagcatggggttcattatgccctgggacaaaatgcttggtttgaatctggttccatcacctactagctatgtgatttagggaaacttacttaggttgcctcagttccctcagtcatgaaagggtgtttgctacgggtaggacctacctcaaggttgcctcacaaacaatatttgtaaaacgttaataacagcacccagcacatggtgaacatggatgttaaagtagacccaaagttccctgaaggaaacagaactggcaggagaaacacatgccactgagagaaaatttcaagaagaggaatcatgctgtggcccaaactgagcagcaggtagaggtagaggctgtgtccagccattttcctgacctaggctactatcccttgttcctctggtttgagcattatcagaaaaaaccagttctgaaataaaggaaagagctcttaggaggttcatagcagttctgctatgaagaaaactcctctaagttgctggtaaacaatagtggaaggagttttccagttgtctaggaaagagaaagggcattggaggtgagtgacccaggtaggtaagcaatggtgagaacacgatgtgtccatcatctgggcacaggaggttggcaaaagcaaggcagtagcccaagggtagcgtgaagatttgcaaaggctggtctgcaccttctggacagagcagccatgctgaacagcaggaacagaagagtacatgagaaccggcagaaggatgctgagctgcagctgaaatctgggatatttctgtaaatgtacaatacttgcactcaccaatgggtgaggccagaggatctaaaggtgacattttatcttttaaagttcacttctcaactgggtgtggtgccttacacctgtaataccagcactttggaggaaaacaggaggatcactggaggccagtagttcaagaccagcctgggcgacatagcaagacccccatctctacaaaaaaaatttattaatacaaattttaaaaataatgtaaagtttagttctcatcattccatggtgtaccaagtacactttgacttctaggtactctgttgtctgagtgagaactattagtaccaagaaaagcaggacagatagcagagttctgagtctaattactatctattggcttttctgtgtctctaaggcctttcaggggcacgttgtaattctagtaataaacaccacatttgaacagcagtttacagttgacaaagtgctttcacacacatctcttaatttttgcaaccagtaaaatatagctcaacaataaatagacttccttatgtgaatgtactgtaatgtattatctattcatagacaataaggttttcaattttttactattataaacaatactgtgaaaagcattgtgatgcataattatttgcatatctataattatttcttctgaatattcctaaaagaattgctgattcaaagaatatgcccattgtaaaagtttttaatatgtaaatttaaagtattccatatggattattaaattgttttgatgtattttgctactataaataaaaaagtgaaattaacatgcaat

SEQ ID NO: 844 - DNA, 1020 bp, Homo Sapiens
atattcaatatgtaatcttgctgaaaactcttaggaaaatgggaattggtgaatacttactctatcgggggaccccaacccctggttgtgggggtaccggtctgcagcctgttaggaaccaggcctcagagcaggaggtgagtggtgggcgagcgagcattaccacctgagatcagcagcgccattagattcccaaaggagggcgaaccctattgggaaccttgcatgcaagggatctgggttgcatgctcctgatgagaatataatgctgatgatctgagttggaacacttccattcccaaagcatcacatcccccccactccccattcgtggaaaaattgtcttccaggaaactggtccctcatgccaaaaaggttgaggaccactgcagatgataaaatatattaaatccaccctcacacctaagaggatgcatgcatattggttcagtgcacagacttggggctaaatgtttccagattgtggcacacacagaatatgggcttctcaggctggctcagtcccactggtcaccctggggccagaggtcagtacccatttgcaactctgtggctcactgggtgggaaacgctggtataaagaatgacaaacaaacaaacaacaacaaaagaccagcaactcagcagaaaagcagacaaaggatatgaacagacaattgataaaagaaaatagaaataggctttaatatactcaagctcattaattataagagaataataaatgcaactacctatcatattgccaaaattccaaaagttgaatgacacataatgttggtcacgggtggggaaacatacatttaattcaatcccaattatattgttaacaaatttggagggagcggcaggtgcaggcaggaccaggaaatcctagagggaaatcaaactgaaacagtgtctttaggggggaaacagaatagatatcaacattatgaatgcacactcccgtgatacagaaattctacttccagaaacttactctacaaatgtttacgtaga

SEQ ID NO: 845 - DNA, 3370 bp, Homo Sapiens
ttttgagacgtttcactcttgttgcccaggctggagtgcagtaccgtgacctcagctcactgcaacctctgcctcccaggttcaagcgattctcctgcctcagcctcctaagtaacggattacaggcatgcacaaccatgccccactaatttctgtacttttagtggagacggggtttcaccctgttagtaaggctggtcacaaactcctgacctcaggtgattcacctgcctcggcctcccaaagtgctgggattacaggtgtgagccactgctcctggccaagggcagaaactcttacaccttgttcactgctgtttcctgggcacctattatagtgcctggtatatagtaggtgctcagtaagtgtttgttagggactgatgcgttggttcaagcctgtaatcctgttgctttgggagatgggggccagaggattgcttgtgcccaggaattcagggccagcctgggaaacatagtgagaccctgtctgtagaaaaaataataagctggccaggcgtggtggctcacgcctgtaatcccagcactttgggaggccaaggtctgcagatcacctgaggtcaggagttcaagaccagcctggccaacatggtgaaaccccatctctactgaaaatacaaaaattagtcgggcatggtgacacacacctgtaattcaagctactcgggaggctgaggaaagagaatcgcttgaactcaggaggcagaggttgcagtgagccgagatcatgccactgcactccattcagcctgggcgacagagcaagactccgtctgaaaaaaaaaaaaagaaaaagaaaaactaataaacttagccaggtgtggtgttacatggctgtaatcccaactacctgggaggctgaggtgggagaatcacttgagcccagttgatggaagctgtagtgagccataatcacctcgccgtacctcagcctgtgtgacttagggggactctgtctcaaaaaaagtaaaaaaaagaaaaagaaaaaagaaatattcattggggaaaagaagagtgaacaagcaaagtttcaggagagtactgtgaatgtgggtcatgtcagtaaagtgtagggacttgggcaggagcggctggacttgaagagcaggttggtggagaccaggtcatttatcctaagaagtttgccctgtagcatgtagattaaatatcccacgttggctgctggcaactgaactgggcttcctgtttctgtgtttggtttgaccatcacagtgttgaagaactgttgaagtgaataccttgcagtttgctacagtttcccccggtctcccacattactctggcctccttacctcatgtaggttgcctgaccctctgagacctgtgtttgctgttcctgcagatgggtgggtatgaggtgatttaaggaggaagatttaatatatgagttgtagaaagataaatagactgggcgcagtggctaaagcctgtaatcccagcactttgggaggccaaggcagaaggattagtttgacccaggagttcaagaccagtctgagccacatagcgagaccccctctctacaaaaaatttaaaaattagccaggcatggtggcatgcacctgtaatcccagctactcgggaggctgaagtgggaggatagctggagcccaggagttgagaaagctgcagtaagtggtgatctcgccactgcactccagtctgagtgacagagtgagaccctatctcaggaagaaaaaaaaaaaaaaaaaaaagcaagagagataaatagatccaccattagtgggagtgtgcttttgagtgctctttaggagaaaaatttattttaatattttttcttctttatattttttatattctagcaagccatttcttcaacaaggagaaattaatttcatccaaagagccctaagagcaagggcagactcagaaaatcagaggcactgtagtcagtttgagcagcttatgtcttcagactgctaagctggccagtgccaggctgggtccctttaatttctcaaacacaaatcgccctgctggaatctcaagttggatctgcagtagatcaccattaactcagcagcttgctttgttgtgagtccttatgccaggaactgtgcgggatacaaaatgtaagagaaggctggaatagagcatctcctggggaaatgagagccagagatacagcggtgccccatggagacagccagctggtgtttggtagttccttgtggaaaggctgtactttggtaaggtctccatatctgcagtgtggccttcaatattgtaggtccccaaactccaggtttttacattcgctgcatagctcagggtcgtagggagtgattcatcctagcagaactctggtttttaaggcaggcgttccatttattaattgacaaaggaggcatatttctcctttagtaacctgatgatttaggtcctttcttcagggactccctttccacataaaggttcttggaaaactaagcagagtatgaggaaaaggctgtgaacaagcttgctggtccctccctgtcctaaaaaagagcatacctcttctgtaaccagaaaacccttttcactagtcaaggctgtgcagactgagatgaaagtgtgtgtgtgtgtgtgtgtgtgtgtgtgtgtgtgtgtgtgtggacagggtctcactctgtcacccaagctggagtgcagtggtgagatcagagctcactgcagcttccacttttgcagcttccactttcctcctcccacttcagcctgcagagtagctgggactataggactgtgctaccacacccagctcattttctaatttttcgtagagatgaggtttcactgtgttgcccaggctggtcttgaacttctggccttacgggatcctcctgccttagtctcccaataggctgggattataggtatgagccacttcacctgacctgtgatgagttttcaacaatgtgattcctcttttacagaaccacctaagctaaagattcttttgagaacaagggctagcctgtggtttcatggcctttcttccatttggggttcttgccaagtggaatttaaatgacctcttatcaagatggataaacccaagtttcccagtgctggaatacagaaaatggatggacaagtaagtcccactcagcacccatagcccagacatggggacctcaacacacctgggccccagacatcacctttcattgtgggtagctcagagatgacacttttggttgttaagtgcccactggcaatagtttctataacagcaagtgaaggaataaatagtcaccaaaacattttctgttcccaattccaacattaattgggtgagataattattttatgaagaattgtca

SEQ ID NO: 846 - DNA, 9378 bp, Homo Sapiens
aaacagcacacctcttggtttatttgtattcatttcatcagtttcaaggaaaatatgttgggagttcctcgcatagagaatgtcacaaagacatgttttcaatagtagtgctatccctagggcagagaagacccagagaaagcccaagtggctgctggaacacagtcagacaccgtgccacctgtccacactccttggctctgccatcatgctgaagatcgctttaaaggactggcttccctccccccaaaatgaatagagcacagactgagaaactgaatgtgggagacagcagtggattatgctgttctcaggggtcacctcaggtttggaagcattctttcaaattaacccatctcaggccatctgcagagaagaaaggtggtacctaacttttttcttgtcagcatttggtaggggtgttttattgaccaaatatgttcccacaacctagttttttgtgagtaactaaatatagtagagttttaaattttatcatcaaaatctatagacaatttttgatgaaaatagactccatctctatgtcctgcttttcttcttcttattaattacattgctgtataaaagaacaagacttcagaatcaagaatatcttgtctcttggcattgaatttatacaaggtgctctttctttaatgctgtctcaaaggacatatttttactcattaaaaaggaagatcggaatctagttgtatgcgctgctccaacatattaataattaaaattaggaggtaaatgtggtcaaaactatagaaagactgagatgtcatttatattgattgctgtatagcattctacaaacagaaattgttaaataagtttatataaatattttgtagcatttcaaatatttgagtgcttgacgtttctcctcttctatagttcagattatcaatttgaagacttactccgctagttaaaatgtttttagtctcgttcgagtattatataaaagcaattttcagttaaatgtgttccgcttacatacaacattacaaattattgaggatttaattacttattcatgttcctgtaatatctttagaagattttcttattattacctatcaatatatgtatgctttgtcaaagaaaaatcaaacatatatatcattgaaattgaaactttttaaaagtacttattaattctattgaaaaaccacatccataggaacaattacaatataatattgtgaacatgtaaacatataccctatgtctattttatgtataagcatgtatgattaaaaatatagtgaagaatttttaaacctagtattataaagtaaaaattagttaacttctgatgattatttgttaattaagataaaattattttgatttgggtgattttaaataaagaaaaatattaaattacatgacaaaaattctttataaaatgtttatgatttttacattggttttatcactttttccactattttattttaagatgacctgccttgtttaaaacactgtattcatcttaattaaattagattccatttgtaaaataattaacaaatgatttgctctattttacagtgcggttataaactgagtcagtatctcaagatttgatccccattatcatcatctgtggccctatttgttttataaatgtattgtctttttccatgcctgtcacatctctattgctttttcatttttctctttgtcccttatagggagcattgcctatctctagattaagcaaaggttgcatcataaaaaagcacaataacctgctcaatctttctcacacagagaaatgtttgttaagtaattaaagtgtagatgatgatacaaagaccttgattaaattagataacaaagtacccttgtgattcagaatatgaatggtatttaatttctttgaaatcattaattgctgagtgacattaattaatgccaattttccagaagatgttctagttaatgaaatgtatacaacgaaaagcacaataacctgctcaatctttctcacacagagaaatgtttgttaagtaattaaactgtagatgatgatacaaagagcttgattaaataagatgccaaagtacccttgtgattcagaatatgaatggtatttaatttctttgaaatcattaattgctgagtgacattaattaatgccaatattccagaagatgttctagtgagtgaaatgtatacaacgtgcaaaagattcagaactctgaagggcaacattattctataattaagaattaagaattaattcacatcagttattggggagaaataatttttaagaattaatgactgagaaaatgttattttttacttagaaaattattttgtgcatgagcattaccgcaagttttgcaagaaacataaatttaaagaaacaattatgtgcacaagatgaatttaataacatcttgatatattccatgattgcggttttatttggtaaatctttaaatgcacaccatttaatgataataaatgaatcttggaaatcttgtaggtaagggtaaatattaggatgcatccagttacatttacacacacatacatgcatacagactgattcacgtgtgtatatatatatatatgaatttaccaattgatgttaactaatatttataagagccagttggattgatatatattgttgaacctgaaaaatatttattatatacatgtttaaaatacacacagaaataaatagcaattgcactaggtatttgaaactgtactaaaatataagctgtgaacattttgtgatcattacaaattcttacactgaataaatatgtttatttttacaatattaatatgtttgatacctgtgtacattttttacaatgtgttattttatttttgtcatagagtcatgtcatgcataataacattttagtcaaagatggattacatatacaaaagtggtcccatgagattataatatatatttttacatacttttctacgtttaagtatgtttagatacataacctcttaccactgtgctcttattgcctgcagtattcagtagagtaatgtagtacacagatttgtagcctaggagaaagaggctataccatataacctaaacgtggtaggctgtacaatctaggtgtttgtaatattctctgtgatgtttgcaaaatgatgaaattgcctatgaatacatctgttaaaacgtatccctatcattcagtgatgtgtgactgtactaaaatgctcaatgtaagtttcaatgccctccataaaattgttgtactgtgaaatacaaatctctcacccatggcctgaatatgtttgcaaactaagcagatcatgggaaggagaatgtgctggcatcgctgggatgattttctcacactacatgaataatatctacagacttcgtgaatatgagccacttgcatagagttaaagtagacgtctctttgctgggaaatttatcaaatgggagtatgaagtgtttttacaagatacttgtttgtttgtagctggtaggcctacagtggctcatggcaatggttgaggttgctaagatttggtggaagaaggcaaaatgagatggccacttatatggtatatggatcacttgtttctgttgagttacaaactcagctggctatttctccaatgttagttatttggagaaaaaaaaacgtgatggtaattttggggtaacaaatacaatatttgatgaaagcaaatttattgagggttagacaaactacaagatactttaggctgcaaagtcaacacgagacttctggcccaaattgtgaagagtttgcgtccagctgcacagttcaaaggaagaggccatgtaagaagattctcacttctgacaccaactgccagttcaggggtttcccctgaacaccctcagtttcaagagtttactagaaagactcacagaactcattgaatgccactgtactcatggtttataatagagaaagggtagaaattaggaccaatagaagagacatatcatataaggtggaatctaggagattttgaatgttaagtttccattgtcttcaggacatattacctgtcactgttgtacagcaacaaacatggagtactaccaacctggggagctcacctgatgctaacaagacactatttacaaaatgaaaagacaaatgaaaggatgagataagatgacgttccacattaaggcactggaacgattagcaaactaaacctaaagcaagcagaaggaagaaaattaaaattagagaaattaataatttataacaataatatttgttagtgttgaataattgatattacttcttgactagcttttttaaaaaagagaaatattcacttcccaatttattctgtggggccagtgttactttgatacaaaaattagtccaaatagcatagaaaaataaaactactataagtataaatgcaaacttccttaaaaaatactaacaaatcagatctagcaacatataaaagaattatacactatgacaaagtgaaatttatacaagtaatcccaggttggtttaacagcccaaaatccattaaggtaatacatcttatccatagaataagaaacgagaattgcatgatcacgtcgatagattcggaaaagacatttaacagaatccaaatgctttaatgactaaaaataaaaataaaaactcaatgaaccaggaatagagaactttctacacctgatatatggcacctgtgaaaagccaacagcaagcatgcaacttaatggtaaaggatgctttcccgctatggtgagagatatatactttgataggatatatactttgacctcttctagtcaacactgtactaaagattttatgcagggcaaatcggcaactaaaaaaataagagtcacccatactgaacaggaagaaataaaactttatttgaaaataacattcttgtatatagaaaattttaaggaatccaccgaacgatagaactcgtaaattatttcagcaatattacagcaaacaaggtaaatgtacaaaaatcaatttcacacatctgcaatgaaaaccccaaaatgaatttaagaaaacacttcaatttaaaatagcatcaaaaaaagaaataataattaatttggaaaatgtgatacaagattttcctctgaaaattaaaaattattgtttaaagaatatttaaataattagcaaacaccttacacccatgaattggactatttaatattgtagtactttacaatttgaactacagatttgatgaaatccctgcaagtatcccaacagacttctgtctagaaactgacaagctgattctaaaatacacatggaattgtaagggactcaaaatagccaaaataatcttaagaaaagaaaacatgttaggataattcacacccccatgctccaaaccttactgcaaagtatcggtaatcaagacaacacaatactgatgaaggaaaaatatatagattgatggaagataattgagagtccatatataaaactatgtgtctacagtcaatggattcttacagtggtaccatgtgcaattcaatgaggaagagacagtctttgaacaaactgggtcaacaaagtacacatggatcaccacttgcaaaataataaattcgaacccttaccccaaagcatacaaaaatattaactcaaatgaattaaagacacacatgcaagaggtagaataaagcatatgggaaagtcttcaggattttggatctagcaaagaaatagctgtaaccccaaaaacatgagcaacaaaataaaaattagatatttaaaatttcttaaaaattaaagacattggtgtttcaaaggacaaacaagcaagtcaaaaggcagctcaaaaattgtgagaagatatttgaaaaacacgtatctatatgtctgtatatatatatgtatcttgaatatagaaaaattgttttaactccgtcacaaatatcccaactcaaaactgataaatgataggaatagatgtgtttcccaagaagatacacgaacggtcaataatcccataaaaatatactcaatagcatcactcatcaggcaactacaaatcaaaaccacagttagatactctatgggtagaactggccaccttggaaaataatttgatggcttctaaatatatgaaacatagaattgtcatatgacccagaaatttattcctaggtatacacccagattattggaaagaggtgttcaaacacaaattgtacacaagtatttttagcagcagtatttaaaatagccaaaggctgaacacaactcaaatgtcaataaaaatattattggataaacaaaatgttatatccaagaaattgaatgttatacagttataaaaagaaataaagtaccaatacgtacatgaaccttgatagcattatgccaactgaaagaagccaggcagaaaaggccacctattgtatgattctatttagatgaaaacagactaggaaaatctatagagacagaaaacagatttgtggttgcttaggattgagtaggggatgggtgcataggaggttaacagctagggaaggtggggtttctttttgaagtgatgaaaatgctctaaaattcattgtgatgatggctccacttatctgtgcatatactaaaagccactgacttgtagacattaatgtgtgcactctacactatgtaaattatatctcaataaatcctttcaaaaatacacagaagagtaaggggttttggaatgctgcagctgggaggcagtttgaaatactgaataggcctcatcgagaatgtgaagtttcagtaaagacttgaggaagttgaatgagctgatcaatggatatatggagggctatctttccaagccaagaaattaactagagtcttgaccataaggcagcagcatgttggcatgtccagaggacagtgaggtggccaggaccactggtaagatcaagggtgaagatataaaagaattttggcagttaacatgtggcagatgatgatgggcttgcagatcattgtaagaaatgttgttttggccgggcgcggtggctcacgcctgtaatcccagcactttgggaggccgaggcgggtggatcacgaggtcaggagatcgagaccatcctggctaacaaggtgaaaccccgtctctactaaaaatacaaaaaattagccgggcgtggtagcgggcgcctgtagtcccagctactcgggaggctgaggcaggagaatggcgtgaacccgggaggcggagcttgcagtgagccgagatcgcgccactgcactccagcctgggcgacagagcgagactccgtctcaaaaaaaaaaaaaaaaagaaaaagaaatgttgtttttagtgtacatgaaatggggagacaaatcattatcccattatcaatattttaataaattggatccatgaaccaaatccaatgagattaaatcaattaataataatatgcaaatttgtattaaaattaaaagaattacttgcacatttgagaacaggagagacatgatttttatcagcaataataaacattattaattttaattgtgatcagctaattgagattaattgcaatacatcatgctttataatgtgactgccaaaaggaaaatatgattgtaatcttatactacatctatcaatgtcttttatacataagagtatagagtaagcccgtagttttcaaagccaacctatgaagcagtgacatcttatgcaagtttgctgctttctgccacagtgatccttggtcagcgggcacaaattgttttacaaacgccccctaggtctaaaagtagtttggatcacaatgaacacagaaacaccttcatcccttcagaaatacctatcaattacttccaatacagaatgaaaaattgacaaaggaaatatgtggattgtaaaaatgccagttagcttgcaactacatgaaagaaaaatgccatttttattacattaggtcattgtttcacatgagttttggtatagcaaaatgttgaaccaagggaaaagagacatgaattaatgaagtcttaagatatcaagaatttgaaagaaaaggcaggtcatctttgaaggttagtgacatagcattcatcttctgttgtcacctttcctgtcattccctgtatgcctgatggacaggtttcactcaagttcagagaacagcatgcaaaattagctatcaattaatctttaggaagtgagctgcatttctagccagactgagcttacgttttagcaggaagcatttttgggaaatgtttatgttagagttggcccttcttgacaaggtgagacataaatgtctactttatagacatgaattaagatgggaagatatttgggggaatcatttactcaaacgctaaataataaaggtacacaaagggcaaattatactagatttctttcccacttgttttctatgtctcatgcaattcaccttgattcccttcagtttctgtttaatgtagaaagtggcattttcattattttaagcttctagcacaatgaaagaatttctctttttcatgaacaggatcatacatgaaaaggaggaagagtgtcctatatcatatttattgttcaacaaaacactgctccacggcttaaattcagtttaagaaagagaatttgttgaacatctaacacatacataaaaggcagtaaagacacatgagaagagggcaggatattgaagtatacagacttcaatgctgagttttatatcttagggagttactccaccttacagaggctcaatttcccctgatttaggaaggcgatgctaatgggtattgcataggtgtaagtataaaaatgttgtattgaagagaatcccacaagcttggtataaggccgaaaataaattgatgtgacatgaataagtagtttattacatttgtatgctacctgcagactagaggaagcaagaaacacagccactatgcttgattagcattatagggatggtacaatgattgttgccagaagctggagggaggaagaaatggggaagtattgtttaatgggtatagagtttcagttttacaagatgaaacgaattatggagatggatggtagggacggctgcacaatgttatgactatatttagtaccactgaactgtacacttaaaatggttaaccgagtacattttatgttatgtgtattttaccacaataaaaaaataaaataccttaggaacattttcatgaaaaagcccacataaaattcattttaatgcacgtgtttatgcatagctttctatttttctcttttccctttacattcctaattctaatcagagaagggaatcccctctgtacctccaggatattcagtaaagaccactggaggttcatgccc

SEQ ID NO: 847 - DNA, 1342 bp, Homo Sapiens
atggattctgatgccctgcgagtcttccagaatgagctcatttgctgcatttgcgtgaactacttcatagaccggtcaccattgactgtgggcacagcttttgcaggccctgcctctgcctctgctcagaagaaggcagagcaccaatgcgctgcccttcgtgcagaaaaacctcagagaagcccaacttcaacaccaatgtggtactcaaaaagctgtcttccctagccagacagaccagacctcagaacatcaacagctcagacaatatctgtgtgctccatgcggagactaaggagctcttctgtgaggctgacaagagattgctctgtgggccctgctctgagtcaccagagcacatggctcacagccacacccaataggatgggctgctgaggaatgcagggtacaaacttataaaggaaatggactatttatggaaaatcaatcaagagacacgaaacaatctaaatcaggaaactagcaaattttgttcattagtggactatgtgtcattaaggaagaggataatcactattcagtatcaaaagatgcatctatttctcaatgaggaggagcaactgcatctgcaggcactggaaagagaagcaaaagagcttttccaacaactacaagacagtcaagtgagaatgacccaacatttagaaaggatgaaagacatgtacagagagctgtgggagacatgccacatgcctgacgtggagctgctccaggccattttttttgcaggactgatttggcacagatgcaaaagccccagccagtgaacccagagctcacttcatggtgcataactggagtcctagacatgctcaacaacttcagagtggataatgctctgagtacggaaatgactccttgctatataagcctttctgaggatgtgagatatgtgatatttggagatgaccatctcagtgctcccacggatccccagggagtggacagctttgctgtgtggggagcacaagcattcacctccggcaagcattactgggaggtggatgtgaccctctcctccaactggattctgggagtctgtcgagattccagaacagcagataccaatatcgttattgattctgatgaaagattttttttaatttcctcaaagaggagcaatcactatagtctctccaccaactctccacctttaattcagtatgtgcaaaggcctctgggtcgggttggggtgtttctggattatgataatggatctgtgagtttttttgatgtttctaaaggttctcttatctatggttttcctccttcctccttctcgtcccctctgaggcctttcttttgctttggttgtacatga

SEQ ID NO: 848 - DNA, 3458 bp, Homo Sapiens
actcgatgggagccactagagggaataagatgttctcctgctgtatcccgactttctgaggctctgactccaggaaagcccggcacgagggccttttccattgctgcaggctttttggctcagcactcacttttggcacctctggccatttggcaggaagtacccaaagtgatggccaggcagggccctgatgtctgatgatctggctgccgagcatcatttgtgcagagctccatgtgagagatcagtgaggagctggttgatgggttcaactcctccatcttcctagacaagggttgtctgctcgtgttcttgttgccgtgacagcccttctcgcaccctggaacctccaggcattcgcccctttgctggatctgggatcctcatagctcaggttctcaagactgcctttattgtaaaagaaagaaaattaagtgccttgctttgaagtctaaaggactctcctagggtgggtgttgtagtccattttgtgctgctgcaacaaaacaccatagactgggtaatttatattgtacagaaatttatttctcacagttttggaggctgggaagtccacagtcaagatgctggcatctggtgagggccttcttgctgcatcatcccatggcggaaggcttcacagggcagaagggcaaagagagagtgagagacagcaagagggggcagacccacctccacgatactcacattaatctacccatggtggtagagctctcatgacctaaacacctcttaaaggtcccatctcccaatatggtcacaatggcaactacacttcaacatgagttttagagaagacaaacatgcacaccatagcagtggatccacactgtaaactggtctctcaacttggtgggggcagtggggtggggaatgaggttcccccagatcctctccctccatgccagaagaagactaagcttcaggtagcttagggggaaggtgatgcggccctagctttgggcagttcttagttctgtcttgtgtgaccttgagcagccatttgacatccctaagcctctgttttccatctcaacaatggggatttttttaggacgcactagagtgatgctcttcatacaagctcttaataggggaatgctaacctctcttgctgtgggcactcacatccctcttcacacacaagtccccaaggagttggggcttcctggtctgagctctagctcacgattctcctggtggtttttggtgctgcctctgactctgtgtccttccttgtcccactcagtataaaaatgagttaaccctgcacctgggcgagatctgcacaatgtggaccctccaggtgggcactcaggagcatatggtggcatccctggaccaggcttccagagcagacacataccctacagcaccaccttcctgggaaaccactggttcttcgtctctaccccacagttcctggactgggtattcaataggtgggagcctgtcccttcgacagcacagtggggactctgccaccagctagctgtgtgtctcaggaattttgctgcacctctcttagcctcaatttgctcctctgagaagaaaggtgatacacatgcatcctgccatattctgacagagatgatggacctcaggatcaactaaaaatgtcagtggacttcaggtctagaaggacaggctcctgtttccccagaacagttgggggcatatgggagtctgtggctggggaggggctggcagaaccctggatctcatacatcttaggattcccatgagagggctgaggtctgggggcttcctctgcaggaggaaattagttagtgagagttatggataggatccaagtcccctgggaagtgaaagggaggctggggctcagagccatccccaccacagtcccatcccagctctgcccgcctccttccacatccacccctccagacccaacctctaggggacctagaacaggagctgtagtgagcaacccgctcacacttctacctcaaacctcattcctggtgcaggtagcccttcagagcaagagtcactggcaagacccagcccatgtaggttctatgcctgccctgcctgaagaccagggctgtctctgccaggacagtcacagaggggttgggtggggccgtctctggacaggcagggcaggcacaggggcccacatccaaacaaggtgccctagaagagcaatgtggaaggaaaggccaggtatgtgactctgctgccccccacccccaccccctaacactatctcttctatcctgggcacctggccagaaaagtaccctgagggcactccggggaaggagcctgctccagtgacagcccaagatagaatcagtcccagagcactcctgcccctagcctgggaccatacagaactggcccagtgaggaggtccccagcctcctgggggattctttcctatgctggtggcagagcaattgactctgatggatgcaatgagcgctgggctctcagggcagggttgggacagcctcccctctgggacctttccctgagcctcagtcgaatgatgcgggcccaatcccatctccacctcttaccaaccatatggcctggactagattcttaacctccagaccttcactgtccacatgtacagggcagagatgggacataacagcacctgccacacacagtgactgtgcagaatgagaggagagagggaaggcaggtcagggcctggtccctttgtaggtggagggtgctcactgaggagcagccaggtgcatgggttgcccacttgtgctcaggaaacctcacccacctcagcccttattaggcacctaatgtggattctaagacagacactgaaacaaagctgcccctggggaagacgacatgtatccaaatggggagacagactagatggctgatcaagaaggagacagatgccatctggggagggacaggcataagccactttctggtgcttggagttagtgaggaagggctgagtgaaaatgccactctcctgtgcctaccaatattgggtcctgggtcatcatgtgctgggtgccctcagtgaaccaccatgtgatgcagagaccagagagtgaaggcccgggccggcgcagggtggtgcaactttgaatcgaggtggccaaggtttgctgtgggaggcccagggagctcccgtctgtgtccccttccaaatctcatcttgaattcccacgtgttgtgggagggacccagtgggaggtaactgaatcatgggggcaggtctttctgtgctgttctcgtgacagtaagtctcacgagatctgatggttattataagggggagcttttcctgcacaagctctttttgcctgctgccatccatgtaagatgtgacttgcttctcgtcttccaccatgattgtgaggcttccccagccaccaaccatgtggaactgtaagtttaattaaacctctttcttttgtaaa

SEQ ID NO: 849 - DNA, 2045 bp, Homo Sapiens
ttaagcgctcaagttaaactccttgtgacccacataggttagcagaatttaaatcctaggtgattattaactctaatcatacatctaatgacctatattgaagatacactgcctgcttagttgtggcttcagcctttgctccgtcactgatagttctagcctgaaaagcaaatgagccctcatgctcacgatttcaccacagtcacataagcgggaagagcaggctcctggctgtggcgagcttgactccatttggtttgatagaaatgagaggtagatgattccctagacaaatgcaggcctttctcgaagcccctttcccaggacgacgtgacatgagtggtctgtgccttccagggcagccacgtcatgctttgcccagccagggcggtggggagggagacagccacatcctgcccggggctcctgggccccgctgcatcaagtgaaagcagggctggctccctgatgtccttggagaagtcgcccacactgctttcccccatgggagtgacaaggatgtgtcccgccagccttccacgacggaccccccactctctattaattcccaagaaaccaggccatggaggtgggtttgagggtttgtattggtgttttttaaagtcaggttgaccgagtgcggtggctcacgcttgtaatcccagcactttgggaggctgaggcgggcggatcacatgaggtcaggagttcaagaccagcctggccaacatggtgaaaccttgtctctactaaaactacaaaaaaaattacctgggcgtggtggtgggcgcctgtaatcccagctactcaggaggctgaggcaggagaaacccttgaactagggaggctgcagtgagccgagatcgcgccactccagcctgggtgacaagagtgagattctgcctcaaaataaataaagtcgggtttattaagatataatttacatacagtaattttttttttttttgagacagagtttcactcttgttgcccaggctggagtgcaatggcacgatctcagctcactgcaacctccgcttccagggttcaagccattctactgcctcagcctcctgagtagctgagattacaggtgtccaccaccatgccttgctaatttttgtatttttagtagagacaggttttcgctatgttggccaagctggtcttgaactcctgacctcaggtgatccgccagcctcggcctcccaaagtgctgggattacaggcatgagccactgcacccggccagtacatgctttcttgatttgtctgtttcccacctgtctcccctccctagaatggcagctccatgacgacagaggtgtttctctgttttctccatggctgcaccctcagctgctagaaggtggcccagcataggaggtatttaatgaagccttcctctccacttaaatctacacccttgtgcttattaaaaggtgacagttttctgtttgaaaattttattagtgttttaatgagaaagttattatttgggtaatgcctgaatatgaggaaaacattaagggtagaaatgtaattgttttcctatttcattcagtctatggattttattgaagattacagaattacttctttgtagctatggaagtaaaaaaataataagacgagtagctatttcaaaacgtagggctgataaatttgggatggtttgagaacgttaagttggggaactccatttctttttttacatttttatttattttcatttgtttatttatttatttgagacagagtttcgctctgttgcccaggctagagtgcaatgccatgatctcggctcactgcaacctctgcctccggggtataagtgattctcccatatcagcctcccgaggagctgggactacaggcgcctgccaccacacctggctaatttttgtatttttagtagagatgggatttggccatgtcagccaggctggcctcaaactcctgaccgcaggtgatccgcctgcccttggcctcccaaagtgctgggattacaggtgtgagccaccgcgcccagccagggaactgca

SEQ ID NO: 850 - DNA, 1931 bp, Homo Sapiens
gttattactatcaatttttaaaaaggccatggcaccccagaaggtacagatcctctgaatgctaagattgtgtttttacagttgtctagtataggacaggcttctcatgtggaaaagaggattcagtgtggtatcaaaaaattgattggaaggcttcctctcttactctctcatacatagacattcacaaacaccatctttgtttagtaaactgtggagactcttccaaaagaaaatagacactaatttttggagaatccattcagctttcacaggcctctaaatagcacaggtgttagaattactaaggataacgattacattaaccaggagcaaaactaaaaatacatcgttctactttcatacttggaaatatcggccttttgatattacaaaaaggccaattttgccaggtccttcgaaatttcaaagaaagattcagtaaaaataaataaataacaggactcactggagccatgatgaaatatttccacctaaaggaaacaatctttaacagctcatccttcagtacactcaaacttctcttgaaccacttaaaaactccattccagggagtcctccaaagttccacaacaccagacgcaagctacccaggacatgtgctctagcagggcatgcccagggcccccagatagatgactgaaaaatataattctttcaggtggacaaggcccagcaggaacgtagtgtgccaggtttccctgccagccctcctcgccctctcggcggggggccaaatgactcaacacagccctgttcgtacctcccttttcttcccatctcccacattataagagatcagagccaagttatccttcacccaaggtcataatctcagattggggagtggtaagtggataatgacaggctctcacagtgaactctcctcctaaacttggcacatcacaaagatttcatcttgcatgctgtccaacctaggcactggctgctggactgttgacaaagagttgagatgaaatccacccttaggagagagcagtggatggattatcagtatattctgtgggctcccaatagtatatatgtctccagtttgctgtccttgtccaaaccacccaaatcaccaagagttcattgagcaattaatatatacaaggcattgtgagagatgcttccaaacctggccaaatatcagagtctttggggagctttttaaaaatgcagatccttcacaatttttctgtaaatctaaagttattctaaaacacaaaagttattttttaaaatgcagatcctttggtttcactgaatcagaagctccccagaagactgtaatatggtcatttagagagctcagaaaccaccatttaagaggctactaagataactaatattaagaccgtcactactcttacccactactcttataaagaaaaccctgcagtcatgcaaaactgcaacacattcatgggtcatcagatcaattttatgggtcatgaccaggatatactcttaaatacaatagagaagttttaggtacattattactttgtgaatcttttctctgagacacatatatatggatatctatatctatctccatatctacaccaatatagatatagataccaatctgtgtactgcatcacaatgaaaacatgtatgttttactttgcggcaaagactaaaaatgtgaaattaaatggtctaaattaaatgcttcctactgcaatcttagtgtcttccctctcttgttttctagtggaaactaagaagcttaccatcaaccacaactctccattaaaaaattataaattgatcttctcttagccttatttctctaacttggaaatgtggaatttccttgcctttttttcatagacaaatgttgttattctttattaaacttcctccaaatggggtttattaaattttagttttaaagtgtg

SEQ ID NO: 851 - DNA, 2559 bp, Homo Sapiens
gcagattttaaaaagcgcagtgggctcccacccatcttctgctccttgctttttcactccatctggcgtgaagatcttaattctgcgtctgcacaacggcgttctgccgggcgcgccagtttgctcctagtttttttcttttcttttcttttctttttttttgagacggagtttcgctcttgttgcccaggctggagtgcaatggcgcgatctcggctcaccgcaacctccgcttcccgggttcaagcgattctcctgcctcagcctcccgagtagctgagattgaaggcgcacgccaccacgcccggttaatttttgtatttgtagtagagacagggtttcaccatgttggccaggctggtctcgaactcctgacctgaagtgatccgcccacctcggcctcccaaagtgctgggattacaggcgtgagccactgcgtccgaccttaattttttttttaagacacggggtctcgctctgtcgcccaggctggagtacagtggcaggaccacggcttgctgcagcctcgacctctctgcccgaagcgatcctccctcctcggcctccagagcagctgagaccacaggcacgtgcccccacgcccgcgggcgctcctagtttccttgccgaaaaacatcgatgccacgatcctgcttgcacatacatctagcggtgaagtggctgagggtaagggcatttaaaacggacctagggccgggggcggtggctcacgcctgtaaccccagcactttgggtggccgaggtgggaggatccgtgagcccgcttgagtccaggagagcctgggcaacacagcgagaccccgtctctacaaaaaaatacaaaaattagcggggccccttggcgtctgcctgcagtcccagctacaagggaggctgaggcaggagatcacttggggcagagaggtcgaggctgcagtgagccttggtctcaccactgcactccagcctggactacaaagtgagaccgtctcaaaacaaaaaacaaaaccaaaaaaacctggacatcagtgggggctgcatgaccatcagaggctccagtgggggcatctcccctaaactccgtggcagaagactggaggcttcttcctccattcccagggctcctcctcatccatcagcctctccagccccctctgctgagggtcaagagccttcccaaaggcctgctttggagcagacatggtacttttggttgggtcaatgcaccccttcccatgttttccctgaacagtcggcacccagagcagggtaactgacagcaacgcaaccaggctgatggatcactcttctcagcctcgctccttcttgatctcctggtctatttgtatgttaatctatacagaccaaaagggcacactgcaggtttaataaccttcattatggttcttggctgcctgcaagactttttttccatgttgggcaacatagcattagatgacaccagttagaatttcgtggttacttctttatggcttacccttgaggggttatgtgactcacccaagatcccacagagaggcaaggagctggggctcacctgggtttgtggccagagcctgcaggcaactgtatttacagtgggcagggagggttccctgggccccaggagggagtggggctgggctgttaagctttggttcatgccatgctaacagtggtggtgcctcaggacttacagcctccatcttgcaagcccccaaccttaggactagcctctttcagggctggtctccgtttgagattttgtgagccacctgtccctagggagcagtaaatcagggcagtgagtgtggctagttaaagctgagatgcccatggccaggtccccaactctcttccatagtcaaaaggcttagaaggaagttgagggactggggttcctcatggaaacagcgttttatttcttgggggtaatttataagttttcttagctggttctaggcactaagctaaaagctactggtgactttgaatccacactacgccatgaggtcgataccattacaatctgtgttttatgattaaggagactgactcaggtggtgaaacgtctttccccaggtcagtgaggcaatggcaaaaccgagaactgctgcctcagcccattcttaccttttacccttcgctaccccaggcctggcttgctccctccccaccccaaagcacagcataatcctcctccacttcctgcaaaagcaccgctagaagtgacaacacaacacgccacatcaaatgcttacctcctctgaccagctcgtttctcacggcaagtgacggggccacaggcaggcactgtgcacaaccagatgccatccgtgggaagagggtggagtgcttgatgctgccgcatttggaagatgcttcttagccacgggtttcaatcccttctctacccacacagcttctgttaaggcatttcagccgtgccactcctaatttccgtgtgaactctgtaaaattagaattctttgatctgtaggtctctctggtcaaatgaccaagaaacgagggatgtacaacctgagaaagcacgttcag

SEQ ID NO: 852 - DNA, 1649 bp, Homo Sapiens
atccgcctgcctcggcctcccaaagtgctgggattaccggcatgagccaccatttccggcaacaggcagacttttaacacattccttacctaaacttttaaaagggacaaaagatatatgcctttggtttgggagatgacgaaacatatgctttaatgactattgggttggaatcttcttgagagaggatccttcttagcctagactagagtcttcaaaagcccacagtgcttcgtaaagtttcatacgtggaagagagaaggatgttccactggaaaagcagaattgcagctgagctgtcctgaaatgcccagcactctgtggagacgcggaggaggtttcctgggacaaagtgctgaaccagctacagccacaagctgtctccaccatcagatgtggcttacctggttcctgagtcaattccatccagatggtgaagccaaggcctgaagacctttcctgcaaggtcgcagaggaagaggcagaagaaggaccagaacccagctcccctgactccctatccagtgctcttctcatagattacattgcttcagcatccacctggctattgctccatccaggggttacaggagtcactgactgttttggttgcttcttggttggaggatgttgtgcctcaccgatgagagccggaagcaaaggtaccagttcttagaggaagcataggaatgtgtcccttcctgctcgggtctctcaactgaactcaacccttccttgattgattgacaagcatgttatctctcataatccctgcccggtaagggctgatgtccccattttacagatgaggatattggagctcagagaagtgaaatgattgctgaaggtcacacagcctggcttcaagcctctcgggctccaaaaggcatcttctgttctctccgtcaggaagcctcttttggatgattaactgagattaaaaatgaaaagacacatgaaagaaaggtcctttttttcaacctgacaagaactaagaatgcctctgtattccaggcacccagaccagggtgggctggaaagccagccagagagaaagcaggagaaagaaagcatgttctaacaggaaggttaaagcaccctgggatgtgagttggggtggagaagtgaagagggcagttctcacaggggcagagcttggtttggggtaggctaggagctgggaccagaagagggacagggaagggtttattgtgggtccacggcccagctccactgcatgggccatctgacagcgcctgaccgagcagaatgccagggtgtaaagaccccactaatacccagtcaatgagaggaacgccagaggagcacccagaatgttcttgtgcagaggcaaagagcaggagtttgtgaccacagctggcagtccatgtcatcctcactgaacgacctcttagcattccaggtggacaaacatattcacaggtgcccagacaaatgaggtctgcgggagagagacaggctacatcagaggtagactatgtatttacataaagtaggaataagagtctcagaagccttccaaagcagatgtctgcttaaacctcttgagcggtgccctccttagcctggaaggaaggccttgctcaggtagtctcaacccgcatctgtggtgtgatttaacaccttcc

SEQ ID NO: 853 - DNA, 1513 bp, Homo Sapiens
ccatgatgtattgttggcattattatccccagtttaaagatgagccaatgcctaaggtcacacaactaggaagtggcagagctgtgatccacattaggtctttgtgtctaaaagcccacgtgtgctctaaactacttggccattcatttctgtgacagactgaaataggtagttcttccaggctaccccaatcatccacgaacctcttctcaactggtagagcaaatgtttagtaagcatatgccgagacaaaaataataggtgagcctgcagcaaaattgtggaagatagcagatggatacatggaaaggaacttagcagagccagtcccagccttgctctgtacacttgccctgcttgccccaactgcacatcggcagctgagtgccgagaggaacacacctggcagctggattgctgtcccatacctttccggccacacatgaacacttctccattctttacactcaggggttggtcagctttttctgtaaaggcccagagagtcagtattttaggtcttggacaccaagaggcagcattgaggatattctgtaagtacttaaaagagaggagtgtccatattattttttaattgacaaaatttgaaataattgagtacaacttttcttaatggagtctattaatgagagggatagaatgctttttaggggactgtttcacttaattggagttcaaagtaagtagttggctatgatcaaaattgattgcaaatgttcatctgttaggttttaatgtatttcatctttgaaaatgtcttttcaggccgggcgcggtggctgacgcctgtaatccctgcattttgggaggccgaggtgggcagatcacgaggtcagagctagactccgtctcaaaaaaaaaaaaaaaaggtcttttcaagcagtagatactgccaaacactgatatcagtccatgtgcgtatgattttagtcaaacatattcatcacttagaaagcatttgtacaattctactagattgttctcttgatacttacctttcagcatgttactgtgttgcagattaatcacattcagttaaaggttagatgtgatctcctcagtttcacaattaaatggattttgtagtacagaaattgccttcacacttgcattgagctctgaaaaacactgctggaactctagtttgagactggcagtgtgtctgctctcaatgtgtggggatgggaatgccattgcttgtaacttttgacagcatgagaactgcataagcagcttgatgttacttgtgattcaagcaacattagttgtcattattcactgaaccttactgcagtatgttttgcatttaagcactgttttgccttgtaattttagggtgaattcatcaagaaacattatcaagcttgcaacaaaataacttccaaagctattcagtgttgaatagtagtggttgagtgtggtttatctcattcagaacaattgcagtctttgccctgagctcaaaacatcacaataaaatttgattgctgct

SEQ ID NO: 854 - DNA, 1615 bp, Homo Sapiens
ataatttgggttttgtggaatccaaagaagagaaagcctacccagacttccaacctacggaagctgtgagataaaacattttgggttgttttaagccattaagtttgttttggcagcatagaaaagtaacatatagagatatggattctaatcagaagttctatttttaccactaaaggttaaaacatacttggggtagccttttctcaacgttttactttctttttatcaggagggtttagtcaggacaaaagaaaccattgcaggtatttcaagcaggaaagatttaacacaacatactaggcactttataaacagaaaacaaaaaaaagcgttgaggaaacaaaagtcaggaaaactgcctcacaaaatatggaagttgaaagaatcacagggaatcaccactgatgatctcagttatctgtggcatcacaataagtgatcatcagcagaatgtccggaagccactggtaaaatttcatgtctgcagtattcctgccttgccctgcgggaagaagaataatggcttcttcctcggttctgctttccaaatctcatgtgactgcctctcactggtggaagctaactcagatcccaggcttccagcccctgtactacagagaagagcacagaaggagaaatatggccccgaggggctagcatattcctctatctcattgttcccattgcattgatacccataggcagaaaattaagcaaggaaaaaaaaaggcaagaaaagaaaaggaacaccagccaccaaagcacttagcgatttcagattcagacatttacaaagtgaaattgcaaaagagtttcaattcttctttgcaagctccattctacctggatgagtgccatcaccctgtcaggatattttttctgtgtttatacagaatcatggaatgctagcagctataccttaattctttccttttcaattttgctctttttacaaaggaatggaaagtctattgaggttactgaatactccaagtcaagatagctagttagtaactaaacagggttaaggtcttttgaagtctttctcatttcccaactcactgtcaaggtctacagagtctgagatttgatactacttgcagactaacaagtttgcctgccactgttttgtggatactggcagaagacacaggactcttgggtcagagacaaaagacttcagcactcatgggattgaagttagcctgctactgttttgtggatactggcagaagacacaagactcttgggtcagagacaaaggatttcagtattcatgggacaacagtggccagagcagatactatacatcctgtaggtttgcatcacagtcaaggaagagtaagtttgaataattaactggtttttttcagcaaatggaagcaagcttgttctttgtctggtgagacaccttacctcaatcctcaaggttgctcactgcaaatataaatctcagcaatggcccaactaaagggccttgcattcttggcataacagcaagaatatgcagctgaaggacaaaggcaaattgcgtttcccgacacccaccaagaaagggaggactggagttataattaaaagttataattaaaagtatttcatatttactaca

SEQ ID NO: 855 - DNA, 1849 bp, Homo Sapiens
gtctttcgctccaggtagagcttggggttagtacatcactggcctgcgtgctccgctccaggaggtctcggtgattctgccacagcctcatcctccgtcgccctgtgacctactggtattggaacattcatagctaagactccaggacacccacaaagccgagaaatgctgagtttgcgggtcagggcgtccggagactggggaggcctcatcggagtcggccggaaatggcggtggcgggaccgagtctgtgagcctgagcccccctcagctcagccctcagtctcctctggtgcagggtacccaggcgtcctgtaccgtttcagcacagcggctttggccccagcctgtagccctctttgcgcagctctgcgcccgcatcttccccagcttgtgaggtgatgaggagaggttcaccagggaaagacgccgacttggtgtgcagggcttctgcgtggaaggagctctggtctgtggggtcaccagtccctactttaacctattcagacataaacggaggcaccattaaaacattaaagaatttatatgagcaaacagtgatgaaccagtgggacagccccagacatggtttgtcgtttgggggctaccagcgggtcttgaagaaaaggctttaaggtttgtgaagaggcaaagcaaactaaataattgattgggtacagttatgtagtcgtttcatttagagtgtccaggagaaaattttctggttatgtaatcagattaattggagatttatggttggttaagcctgaattttgttttctcctaaggtagtaacttacgagatacgcatttgagttagatcgttttgttgctgttacacaggaacctagatccctagagccacttcagtctacctgctatttaattattttaactttaatcagaagcactgtttttttcctacattttccaaatgtgtggcaagcagagtcttaaatctgttctgccagcctaacttggcttgcagtaaaatcttaaatttccagtttcttttttttttttttttttgtttgtgacggagtctcactctattggccaggctgcaacctccgtctcccaggctcaaggaattctcctgcctcagcctcccaagtagccgggattaccggcatgtgccaccacacccggctaatttttgtatttttagtagagacggggtttcaccgtgttagccaggctgctctccaactcctgacctcaggtgatccgcccgccttggcctcccaaagtgctgggattacaggcgtgagccactgcaccaggactgaaatttccagtttcttttcaacattcaccaaagccaactactcccatccaattcacaacattatcaactatttttgttttttattgtatgtttctatttgtaaatatttcaccggaggaaagcagaaaataatcccattacactccactgtcaaaaatttttctgctttttcttcttttatcttccctaggcacaaatgccttatcaggatatctttaaattcaagtttccctttggaaacttgatgggacagtgtgtcctcagccacactgcttttttttaagtcttgagttttagagctctcttgggataacccaagatacacacaacagccataccttttggaaggtttggtgaatatcagccccttggtcatctccttccagaggacacactgatgtatggaaatggagcttctcaggagagcagctgaatgtcctgaggctgagagaaatatcctggtttacccttcccataaaaagaacctttggggatcttaagattttctttccccagccccagttcttcctggtcagccaattggatggttgtatttagggg

SEQ ID NO: 856 - DNA, 3222 bp, Homo Sapiens
ggcagagattgcagtgagccgagatcatgccattgcactccagcctgggcaatagagcgagaaccagtctcaaaagaaagagttaatttttgatgtttataccaaaatatttagcaatctctaatgtattttgagaaggaattatatttgtgaaagaatatagtttttcaaaatgacatagatattgtaggaaatcggaatttttaaaacatgattgaaaacaagatgagtttcactcattagggtaaatggaaaatttctgagtatgatatcagcaaactctaagattcttttaaaataattgtgcaatagtcatttttctggcagagtcaattcattcttctggttcaatatattctagacaaatgaaagaaaaggaatgttgatctgtgtttatccttgtaatttttctaagctttatatacagttttataaatgggatgaattatgtgcacgataccatcaattctaaaaactacctttttaaaaaccttttggaaatcaggattgcagttgataactacctaaactcacttccagccctataaaaattacttttccaaactaaggagcatcacgcattatgcattgtcagccaaagttctgtagtgtcagcgtgatcattcgttgtgtctgtagtgtcagcgtgatcattcgttgtgtctgtagtgtcagcgtgaacattgtgtctgtagtgtcagcgtgatcatttgttgtgtctttagtgtcagcgtgatcattcgttgtgtctgtagtgtcagcgtgatcattcgttgtgtctgtagtgtcagcgtgatcattcattgtgtctgtagtgtcagcgtcatcattgtgtctgtagtgtcagcgtgatcatttgttgtgtctttagtgtcagcgtgatcattcattgtgtctgtagtgtcagtgtgatcattcgttgtgatctacatgctcatatcccttttgtccacaaaggaaataattcgcctttaaatattaacatcatttcccctatgcaattttaagttttgataatgaaataaaacacaatgcagaatgattttgctataggttagatgaccactgtacttgataattgaaaaatggtttatgttcttagacaagccaatgaagcaatctcctgctcttggaacaaacaaaaaccacatgattaacctctcacaagattgacgtgcactgtggtgtagaaagtttgtttgcctttccataacccagtgtatctaagaattacctcggaacttccatttctattaatattacctactaacacttaagtctgagtgtggtggctcatgcctgtaatcccagcactttgggtaaggccgaggtggtcggatcacttgaggtcaggagttgaagaccagcctggccaacatggtgaaaccccatctctactaaaaatacaaaaatgagccaggtgtggtggcgcatgcctgtaatcccagctgctctggagcctgaggcaggagaatcacttgaacccggagcataggctgcagtgagccgagattgtgccactgcattccagcctgggtgacagagtgagactctgtctcaaaaaaaaaaaaaaaaaaaaaatcgggacatgaaaccataagctgaaatgctgccaagacctaaaggaatgaccctcaaactggaatttcagcattttgtcatgtgattaatccccgggagaatgcagtcagctcacatgatgataggcaagtaaccacctttttctgtactcgtactactgttacttttctacaaaatgaaaaacctaaatgtttttttgttttgttttgttttttgggttttttttgttgttgttgttgtttttgagacggagttttgctcttgttgcccaggctggagtgcaatggtccgatcttgactcactgcaacctctgcctcccaggttcaagcgattctcctgcctcagcctcctgagtagctgggattacaggcacgcatcaccacgcctgcctaattttttttatacttttagtagagacagggtttctccatgttggtcaggctggtctcgaactctcgacctcaggtgatccacctgcctcggcctcccaaagtgttgggattacaggtgtgcgcccccacgcctggcctaaatgtttttaaactctcatcctgatcagtatttaggttatagataattttttaaaactctacttagaatattgtttcagaggagtctgtaaataacaaaactctataattgcagtcatagctgatgtatctatacttggatcttttccaaatgctcttctactcttgtaatttctagtctggtcagctggaaataaaagtatccagtaactccacttgtccatctaaaaatataattatttttttaactaacccattaagtattttttatatgtatttattagccaatcatgttatttactgtgactttcctgtttgtttcttttgctcattttctcaacctgctgatttatgaatacacacacatactctagatcttgattcttctgttattttatatataatatccttttcctggagagtagctgtttaaagtgcattcatgatttttctgatactgatagttttcccacatactatcatattatatttggatgttgccattatcactctaaccataaactggtaatctatttatatttttaatagtatgtgagatttctgtgtattcagtcagattatctatgaatggaaatgaattttcttttaaaatcattattatttctttacttttattaaaataaatacgattatgtcaagtattggggtaatagccagtgtcttagttgtttaaacagtttaatggaaatcagtacaatattttaccattcaactaatatttactttgttgtatgcaagtatgctctataattagggctaacttcttatattttttcaaatcctatcacttcttttgctttgttcatatatcattctcctctgctattttaatgttataattcattctgatttcttgttttaaaccatttctgaaatataatatgcttagctgtggtatattattgttttgataagctgcttaatttatcttatgaatattttgtttgggatttttgtccaaatattcaaaattgatattaatattattagcattcatatattaacattcaaaattaagaattttttaaatttttgttattgccattatttgtttattaaaggttagataaaatttggctttaaacccat

SEQ ID NO: 857 - DNA, 5662 bp, Homo Sapiens
gctcactacaacctctgtctcccgggttcaagtgattcttctgcctcaggctcccgagtagctgggtctacaggtgcgtgccgccatgcctggctaattttttttgtatttttaatagagacggggtttcaccgtgttagccaggatggtctcgatttcctgacctcgtgttctgcccgccttggcctcccaaatttctgggattacaggtgtgagccaccatgcctggcgccatatagattttatcaatacaaaatacaggatattttgacaggccactttatttagaattggaaacaaaagtttccaaattgtttgaatgtgctaaatgcttttagctttatttttctagtctgaacctttccagtagcctttcagtaagatgtaaatattgaaattaaatgtaatatttactgtggtatataaaaccagaaactccagaactacttgtgttagtcatgaaatcactggcctagagtttggtagcttctaacttctattgccagtactgctaaatcttctttttttttctttttcttttttttttgtgagtcatttggtgaggctcttgatcagtaattttcatcttcagtttgtagatatcttaagtctcaggtgtgcaattagttatacttgaattaataaatttaaggattgaaggaaaaatcacccactgccagctgttacttgtctgattcagtgttttctgaaaaaaaaaaaaaaaaaaaaaaaaaaccaggaaagccttttccttaaaacatttagtttataagtttgcatcttttccatgtctcatcttttactatactaattagtatcacacttaattctcaaattgttacatgtaagttacctttgcctccctaaattgtaaattattagaaccggtgattcttacttattttgcagtcttctttttcccagtgccttgcacaggataagtcaaatttggggtgcttattacatgccagttactattccatatacattgcatgtatttactcattcaatcttgtgagcagctacatgagatagatgcgattatccctcttttacctgaaaacaggattgaataacttcctaggctatcaaagtatgcgataaatactgtgactacactatatttcctcatatgtagtagggttttgaggaatactttttgactgattatcttcaatgtgaaggttttcatttgctggcatttatttccaaaacaaagattcctttaatctatattgcttgtctaaatgcagagtaggagtattatttcatattgtattctacttgtaattatatctcgaattgcttatttagtgatttataacatcttggagaaaaatacagaatattcatgtaaaacaatatttcataaagataattgggtaacatatgtaacaatttatatcaaatctcttgaactcaccacaatctctagtctttttcccctcctgtttatgacaccattgtgcttttagtgtcagagacagtctttgtttcatatgttcaatttcttgccacatctggatgtagcgtatctgtagtgttttctgtttctgctgctgctgttaggttctctttacctaacctttcactaattttaatcttatttctctgctttaatatttgttgcctatttatgacattaaaattttcttaaagtacaactttcatgtgcagaactttcagtggtgttgcattacctccaaaataaaatccagatttcataatctgccattcatcgccacctagtttgatccactcactttcacacattgtttggtacaatcatctactaagtaggctttctctttatcctgtacttacttagacctctgttttatgcccacgtatccaaacttaatttttggccaggcgcagtggctatctcctataatcccagcactttgggaggccgaggcgggcggatcacaaggtcaggagttcaagaccagcctggccaacatggtgaaaccccgtctctacaaaaacaaaaattaactgggcgtggtggcatgttcctgaagtcccagctactctgtaggctgaggcaggagaattgcttgaactggcacccaggaggcagaggttgcagtgagctgagatcgtgccattgcactccagccggggctacagagtgagactcagtctcaaaaaaaaaaaaaaaaatatttatttttattttttattacaggcagttggataatatattgtagaaagaaaagaactatgattcaaacagtttaataatgaaatttcttcaataaatcaagcattattcctctgcaggagttttgtgtacattgtctagaataatctttcccaagctttttgcatggctgcttcattttcacctttgaggctgcctgccttttatcttggattaaatgtattctcttatctaaattctcagtatttatcagagcaccttgtttgtttgagtctagcactttagatattatttggtaatttactaatttattatgtatctcccccagtaaattttaagctgagaacagggactgtaactgttttactcacattatatttgtattgctttgcacagagactagatattaaatatttattaaagatagaaataaggaagtgatgctactttgtattcaaagctttatatattcctagacctttgcttatctgttaaaaacaagacctagcatataacatatattagatgctcagtaaatatgtttaatgaataaaaccaaagttatcttctggaatcataatacatgagttctaatacaccctggtagatagaattatctagttcttatacttttatttgttgttgagatggagtttcactcttgttgcccaggctggagtgcagtgacacgacctcagctcactcctgggttcaagtgattctcctgcctcagcctcccgagtagctgggattacaggcgcccaccacaacgcccggctaattttttgtatttttagtagagatggggtttcaacatattggccaggctggtcttgaactcctgatctcaggtgtttcacccgcctcggcctcccaaagtgctgggatcacaggcgtgagccaccacgcctgtcctagttcttatactttttttttttttttttgagaccaagtcacgctctgtcacccaggctggagtgcagtagtgtgatctcggctcactgcaagctctgcctcccaggtccgcgccattctcctgcctcagccttccgagtagctgggactacaggcgcctgccaccatgcccggctaattttttctattttttagtagagatggggtttcgccatcttagccaggatggtctcgatctcctgacctcgtgatctgcccgctcagcttcccaaagtgctaggatcacaggcctgagccaccacgcctggcccctagttcttatacttttatgaaagacaaagaaggtgaagtgctcccctgaccccccaaccccgaaaaaagcttagtaacatgctgaaggtcacatagttttgttgtggtgacctggcctgttttgtttttaacagcaaagcccatgtgtttttcttgcactttgtttaccgtctgactactgccatttccttaatttcaaagattttcaacttgaatcctcaatttcttcacatgaaaaaatggaccatctagattagatggtttctaaggtctgctgtgattttaaagttatgtagcattgtggctgtatgtcttcacagcagttcaagaatattgcttttaaaggaatttgtagttctttgttgggaaaattttctattattttgcttcctcataagtgatgctcatcttttcaaagaaatacatatacatttttaagtgtatgtatgagtagtatgtgtatttctgtctacaaaattataaaatgatgaaactattctgtcatacctagaatataaaagggaaaaaagtgtgaattctttaaatatttttctatgtcctaatcactggaagtcctatagttgtttcaaactgttctgtaaaatttgtcttgttgcttatgttcaaaatatatttccatgttttagtgaagaaaagtacaaagtggcttgacagaaagtgaaattaagactgctggtaatcctttgaagagacttagtaataggagttggcaaatatttaagagtggcattggagacaaatggcagattcaggataggctgtttctgtaggaagcatggttctggatgagtgctgctcataaagtcattgaaagttattccagatagtttaatagaagtgtttgtttagcaaagacaacagattttgctattttgactgcattgattgtattagttcagatttatgaaagaaagagcccggaatacagaaataagataacaatagaaaatttaagcatgtcaagaactctaatgctggaattgtcacagcaaccacaaaattactgggcatcaatagactcctaagaattaagagaaattgcagaatgtaagccataattgtcattttaggaacattatgctagagcacaagtttaggattgggcaaaagagttgatttttaagattgcattggtgttctctctctctcttttttttttttttttggagacggattcttgttccgtcacccaggctggagtgcagtggcacaagctcggctcactgcaacctccgcctcccaggatcaagcgattctcctgcctcagcctcctgagtagctgggattacaggcatgctccaccatgcccggctaatttttgtatttttagtagagacagggtttcaccatgttggccaggctggtctcaaactcctgaccttgtgatccacccgccttggcctcccagagtgctgtgattacagctgtgagcctccgtgcccaggccagtgttctctcttaaatgtgtttcaatatggtggacatttattgagcacttgtgttgggcgtttcaacaggaggcactggtacgaaaagtagcttgttctagttcatatatcatttgcactttgcttaacttgtataagtactttttactgtttaataaatattttattagaaaatacttctctgatctctcattgatgcccttcttactattttaaccattgtcatctttggacatctgtctgaattgtgggtaagaccttaacctttggagtagagagcaatgctgcttacaaaataatgattgttggtagtctgttcaacagatttgcaatttcaaaaagaaaaaaatgcaactttttcccacatctttcacatatattttgcaaatcttatgcacataattcacatattttgcacattttaaatgtaagatgatttgcatgacaatccccttaagtttttaagtgttagtttattgtagatgcttatgtacacagtgaagactgtaggtcagttttaacctcagccaacatgaggttaaccggatgttcaccttactaatgttctttcgtattaattttaatgcttgttaaatttacattttatatttgatactcattttcccaattcacaaaattggcttattgaaaaatgatgaaaatagtaacaaatatcattcgtaaaaatgctccaatggaaataacttcagtgtgaatacagaatgagaaaatgtatgtgcttttggccgggcacgtggctcacacctgtaatcccagcacttggggaggcctaggtgag

SEQ ID NO: 858 - DNA, 1436 bp, Homo Sapiens
tgcccaaaggccagagtcagagcacaattttgaagattacagaaaactccaaagagattgaagagatggaataaaggatcccagcccccgaaaagagaaagctttgtgtctgtagccatagcccttggcaatcagacatcctcctcactaatgtgaggtcaggaggggactagaagtgctcagaggatggactgcctctggccagtgcaggggagaggcaggggtgttgaggcacaggagccagatgagaggaacgtcagcagcaaagcagtaagaagaacatgagagtttcttgatagtaatagaacttcctacacagactgggaaccgggttgtagcttgaggggatgtgacaacatagtggcccggaattttcactttggaaattaactgctttggaccaggaagaagcgctgagcctagaaaggcaggaggcacaggactgtgtgggcttctgtctggcagggacctatgagcttcatagggcgaatgaatcggggcaggataaagcagaggcctccaccctcacagtgctcttagccatctcaggcttcccggaacactgctaccaggctgcctgctggagccctttacactcacaggccttcctgcttgggttctcttctgcaggctgcgtaaaccagtcctgttgtagcccttgtagcatctgctgtagtgatctggtttgggtttcagtattacttgcaatggtttggaaggaaatgggaagtttgccttctaactacattttctttttgattcaagaaccctagcagttctacaaccactgggcctaaaactaaaataaaggaaaaataaataaaaggaagcaaaaacatctaactgggatggcctggcagcattgccagagagagtcctcaggggcccatgcttgttctgtcttttgctctgccatccctagggtggacagcacggaagaggcagtacatcttaacaaaatcagggttctggatgaagggaggggtggtgaatggttgctgcaatcaacagttcatacttcaatggaaagaaggtgggatttgattcctggctgcaaatcttcactctgtcacctgctatctgtgtgccctcagtctcccatcaaggagtgatgtctgtttctccacttcttgaatctgggctggccttgccaatagcatatggcagaagtgacatcgttccatttctgagtcaaagcctgaggaggccttgcatgcttctactctctcttgcaaccctgcactgccacatatcaacaagacttatcaacaagcctgggatagcctgctagatgatgaaagaaatatggcccgcttgctcccatcactccagctgatagccaggcaaccctaagaagcaaagtcacctagctgattagtagctgaccactgacacaaaagtaagatcatctgagaccagaagacagcccatctgag

SEQ ID NO: 859 - DNA, 10870 bp, Homo Sapiens
attatgggttaggtgaggaacctcgccctcttctattacggtacgcgcgatgggtattccctgatgccatgaacttacacgtttcacacacgggaccagacgcttgctttagttgacgcatgaagaccggtccggtcttttgcggagaaaagtggttaaaagctgacttgtgggccgagaaactgtggcaccctaatgagctagggctagacgcttcgaccaccacgccaagtgattctgaagatctctaattctgtcaaggcgagagcgctccaacacgtgttcatcggctgttgctttttaaagagaaggcaaggaggaagtcttgcttttcttgtactttttttcctagaagcagcattaaagatttactccttatgttgaggaagcggaaagcctcttcactttaaaagtgtttatgatcgggcctggcgcggtgactcaccgcgcccggcctgctacaccttttaaaattcacagcaatgataaatgtattagactcattgccaggataaagatttaatctatttttctagtagtgccgtcctatgtggttctgtagttgcttattccaactggtatatttccataggatggggttgaataagaaaaacttgcaaactttcagaaacagtaagttatttttatatttttgaaggcttgctgagtaacgcttctcttggtagcactaccttatctacccttcagagactgttatttcttaggagtggccctgggcaattaaaagcaaaaacttctggccgggcatagtggctcatgcctgtaatcccagcactttgggaggccgaggcgggcagattacgaggtcaggagatcgagaccatcctggctaacacggtgaaacccagtctctactaaaaatagaataaattaaccgggcgtggtggcgggtgcctatactcccagctactccggaggctgaggcagaagaatggcgtgaacccgggaggcggaggttgcagtgagcggagatcgcgcccctgcactccagcctgggcgacagagcgagactgtcttaaaaaaacaaacaacaacaacaaaaaaaccccaaaaacttctttactcagaagtaccctcctttgcattggagatacatgtaaagagttgcttagcagttgaataactcaaaattgcattttggaagcttgctaagtgacaagaccttcttgtatccttttgtgaacccccaaaatatgagacaggcctcagttaatttagaaagttaattttgccaaagttgaggacacgcgtccatgacatagcctcaggaggtcttgtagacatgtgcccaaggtgatcagagcacggtttggttttatacattctagggagaaatgagacatcaatcaatatatgtaagatgaacattggttcattctggaaagactggacaactcaaagcaaaggcaggaagactctgagtggggagggagcttccagggcatagatagataagagacaaatggttgcattcctttgagtttctgattagcctctccaaaggaggcagtcagatatgcgtttatctcagtgagcagaggggtgactttttaaagaatgggaggcaggttggccctaagcagttcccagcttgacttttctctttagcttagtgaggtggaggccccaagatttattttcctttcacactttaggccttatgtctgtttttagttttatatagtagaattccttaaaacaatcttcaactaattcttagggtcttcttaaattcaaaagacaaaccgtatgagccctcctccctgtaacttattccaaatcttaatccatgttttctgtttagttatgcaaaataaatcgaaagaattctgttctccatctctagcctccaaaacctgaaccaaaacaaaagttgtcaaaacagatttttcagtaagaatacactacacatcaagtggctaatgtaaattacaaaacaggatgttaatggcagactgtaatatctctattgtacagataaaaataatcagggtcagagagattaaatattctgcccaaggtcacacagctaaaagcagtggaacagctataagaacccatttcttctggtattaactggtatttacactctttttttttttttttttttaataaataagtggattctggctatgttgcccaggcctgtctggaactcctgggcccaagcaatccttccacctcagcctccaaagtgttgggattacaggtgtgagccagtgcacccagccattaacactcttaaccactacactatactaccttcttacatttatttatttatttatttgagacagggtctcactttgtcacccaagctgaagtacagtggcatcatctcggcttactcaacctcctgggatcaagtgatcctcccacctcagcccccaaagtagctgggactacaggtacaccaccacattggctaagtagtgttattttttgtagagacagggttttgctatgttgccaaggctggtctcaaactcctgagctcaaccaatctgtctgccttggcctcccaaagtactgggattatgggcctgagccactgttcccggccaaattcttttcttttctcttttctttttctttctttcctttcttttctttctttctctttcttttctttccttcatccttccctccccttcctttcctttcccttttcccctcccttcccccttctgttcccttttcccttcccttttccctcctctcccttcccctcccctccctttttcctcctgcctcagcctcccaagtagctgggaccacagacatattccaccatgcccagctattttatgtatttttggtagagttggcgttttgtagagaccagcatgttgcccaagctggtatccagctgctgagctcaggcgatctactcgccttggcctcccaaagtgttggtagtagaggtgtgagccaccgtgcccagaccccaaatttatttttattttattttatttttctaggtcaggcatggtggctcacacctgtaatcccagcatgttgggaggccaagatgggagactcacttgagcccagaagttccagaccagccttggcaatatagtgagatgccatttctattttaaaaaatattttaaaaataaaatatttttctattcacctttcatcaatacaaacccagaagagaatctttcttatttttaaaaatgaggaaattgagccctacaagaaaaattgctatagtttattgatcacttgctaagccatgtacttcatttaatcatcgcttttgaacacagtgttgtataaagttgcccaggctcaaaagcatgtactcataacatactacactaggtagtatgttttcctcatctctggttattttattttatttttttttgctctgtcacctaggctggagtgcagtggggcgatcttggctcactgtagcctctgcctcctgggttccagcgattctcctgtatcagcctccggggtagctggaattacaggcacatgccactgcgcccggctaatttttgtatttttagcagagagggggtttcaccatgttggccaggctggtctcgaactcctgacctaggtggtccacccacctcggcctcccaaaatgctgggattacaggtgtgagccaccgcgcccagcctctgactatttttcttagtgagatctttttagtcacaaatatgtatatggaatttacattccagtcccttgggtttaataatgtacagacagcagaccccctgtatcttcaggtttcaaacccacagattcagccaatagcagatgtggaacctgcagatgcagaatggcaactgtaagggccttgagcatctgcagattttggtatcacggggatcctggaaccaatctccccaaatacccaggtacaactataattatttttgctgattgttatgtctcattagaatgcaagcttattaaggaaaccatatctcttccttttttctttccttctttttttttttttttttttttgagacagtctcgctgtgtcacccaggctggagtgcagtggcgctatctcagctcactgcaatctctgcctcctgggttcaggtgattctcctgcctcagctgcccaagtagctgggactacaggtgcacaccaccacacccggctaatttttttttttttttgtatttttagtagagatggggtttcactgtgttgaccaggctggtcttgaatgcctgacctcaagtgatctgcccacctcggcctcccagagtgctgggattacaggtgtgagccaccatgcatggcctgcctttgaattttttaaaacatttgagcagatatattctataaatagcggtactatttaatagcaataagtggttactgagcacttacaatatgccattgtacttaatgtgcattatcccatttaatcctctcaacagtttaatccatgccactcaccttgttctctgcgagactgattcaattctgttgtagtccccttattcattacatgacagtataatttttgccatttcctcctaacctttgtaaactctactttgatctcatctgactgtaattcaccactgctcttgtttaaagttcacattctctaaacacttatttatctgcacagtacaagaatatctgtgcttctacagagagtcttgtccacccactttcccttccagaaggggattggtatgtgaattctgagtgtttggatcgtttggcccaccctattacctctcaacaactcaagctctctgccatgaagttaaaaaccttcccttactctcagtgccctttattgtctcctctttttttgttttttgagccagagtctcgctctgctgcccaggctggaatgcagtggcacgatcttggctcactgcaccctccgtctcctgggttcaagcgattctcctgcctcagcctcccgagtagctgggactacaggcgtgcgccactacgcctggctagtttttgtagttttagtagagacggtgtttcaccatgttggccaggctggtctccaactcctgacctcaggtaatccacccgcctcggtctcccagagggctgagattacaggcgtgagccaccacgtccggcctaccatttagcatttataaaagtttcccagttaggccaggtgcagtggctcatgcctgtaatcccagcactttgggaggccaaggtgggagtttgagaccaacctggccaacatggtgaaaccccgtctctactaaaaatacaaaaattagccaggcatggtggcgggcgcctgtaatcccaactactcagcaggctgaggcaggagaattgcttgaacccgggaggcggaggttgcagtgagccaagatcgtgccactgcactctagcctgggcaacacagcgagactccgtctcaaaaaaaaaaaggggtttcaaagttaaagaaattaggtagcttaaagctaaatatccaagactatttaccaggtaccactgcaacattaataaggttatttcacaaaatctccctccccttgcccaaatctccatccttcctgactgtacaaatattttcatgtttattttttatttatttattttttttaagacagagtcttgttctgtcaccaggctggagtgcagtggcatgactttggctcactacaacctctccctcccaggttcaagtgattcttgtgcctcagcctcaagagtagctgggactacaggcatgagccaccacgcctggctaatttttgtatttttagtagagacagggtttcacatgttggctaggctggtcttgaactcctggcctcaagtgatctgtgctgggattataagcatgagccaccatggccggccagaaattttttttttttttttttgagatgaagtttcgctcttattgcccaggctggagtgcaatggcgcgatctcagctcaccaccacccccgcctcccagtttcaagtgattctcctgcctcagcctcccaggtagctgggattacaggcatgcaccaccctacccagctaattttgtatttttagtagagatgggttttctccatgttggtcaggctggtctcaaactcctgacctcaggtgatccacccatctcagcctcccaaagtgctgggattacaggcgtgagccactgcacccagcccagaattttttttttttttttgagatggagtctcactctgttgcccaggctagaatgcagtggcacgacctcagcttactgcagcctctgcctcccaagttcaagcagttctctgcctcagcctcccaagtagctgagattacaggcgcctgccaccacgcctggctaatttttgtatttttagtagagacagggtttcaccttattggccaggctgttcttgaactcctgaccttgtgatccacccaccttggcctcccaaagtgctgggatacaggcatgagccaccacacccagcagaaattttttttaatgtatcacagttacttaaatatcttctaagctacaaaacatagaaacgagagaattaatctacaaattttttttctctaaaaattagatttactgattcatgtaatactgtcttcatggtaaatggtggttgatagtgttaacaaaataatcacctaatgttaaattcatgtatctatatggttctcaaattttaacagaattctcaaacttaagcctgaggtttgttaaaactggaatgctaaaagctgggcatggtggcccacacttgtagtcccagctacttaggaggctcattggagcctaggagttagagtctagcctggacaacaaagcaagacctcctctcatgtctttctttttctttcttttttttttttttttggggggggtgggtgggacagagtctcactctgttacccaggctggaatgcagtggtatgatcgtggctcactgcaacctctagctcttgggctcaagtgatcctcttcccttagtctcctgagcagcttggactataagcatgtgcccccatgcctggctaatttttaaaatttttttagagatggggtcttgctttgttgcctaggctggtcttgaacccctggcttcaagcaatcctcccacctcagcctcccgaagtattgtgattaaaggtgtgagccaccatgccagccaagactccatcttttaaaacaaaataactaactaaattgctgggactctcacttctagccaagaccaagtaacaaaaaccagatttacccactcacctaaaataaaaagaaacaaactaggcagcaaatatgaaataatggtttttgaagacactggataccaggcatcaaaggacaatgattcctaaaagagaaggcacaaatgcagggagctgggagattgtcccagtttattgccttgggaatgtgtccaagttgcagcacagaaacggaacagagtaagcctggtggagtctttgagccgagagtctaggaaaaccaaaccttaggacagaattccagagaggagagagcagcacagaaagagagagagctgcagaagtttccttagaatattcagcagagtaattattagcacatgaatctgagcaaactacccaaaaccaaggggaaaatcaacagataaggttagaggaaacattgtccagggttggttgggaacaatgcctggttctatcaatcagccagattgaaaaaaactcataacctgtgggacagtgggtagagtactcaaaaaggtcttgcctcactgatgaagaataattaattctaaattgagtactactctggacctacctaaaaaattataaaaaacctgaaaagatcaaattatttcccagtcatttaactacatcctagaacaaaccgcacaaggatttaaagtaaaacgaaaatacacaatatcaaacaaggtaaaattctggcatctaatacaaaattattgggcatgcaaagaggaaggaatacatgaccatcatgagagtaattgatcaattgaaaccaacacagaactgacagagatgttattttaaataagtaaagacatgtaagatatttttaaaagacttgagcatctagaaataaaaacaatgtctgagatgaaaagtacactagatggaattaacagtagattaaactacacagaagaaaagattaataaacttaaactcatagaaataggaactattcaaaatgaaacagaaaagagtcaaaaaggaaaaatgaagagcattagtgagctgtgaaatagcctcaagtagcctaatacatgggtaactgaagtccctaaaagaagggaagagggacagaaaaaaatatgttaagaaataatgaccaatgacccacattttcccaaatttggttaaaccacacgtatagatgctttactaagtccaagcacaagaaacatggagaaaattatatcaaagtgtattgctatcaaataagttgaaaccagtgataaagaggaaatcttaaaagcagtcagagaaaaagagacttaggaaccatataggaacaaagataagggtgacatcgtatttctcactggaaacattgcagacaagaagtggagtaacatcttaaaatagggaaagtaaaaaaggtcagcctagaaatctatgtccagcaaaaatatcttataaaaagaaggaaaaataaagatgctttcagacatgcaaaagttgaaagaattccttgacagtaaacctatactaccagaaatgttaaaggcagtttttcaggcaaaagaaaaatgacaccatatggatctatccaacgaaatagcatgggaaaagattaagtataatagtgtatatgtaaactttttaatttaaaactttttttaaaaacagataactgtttaaacaaaaataacatactgtgagatttataacataaaagcaaaatttatgaactataatataaagactggaagaaaaaaatggaaacattattgtaaggttcctattctatacacaaagtggtataatatcactgaaggtagactagtaaattaaagatgtatataatagcggggcagttccaagatggccgaataggaacagctccagtctacagctcccagtgtgagtgacacagaagacaggtgagttctgcatttccaactgagctttgaagagagtagtggttctcccagcatggagtctgagatctgagaacggacagactgcctactcaagtgggtccctgacccccgagtagcctaactcggaggcatcccccagtaggggcagactgacaccccacacagccgggtacccctctgagacgaagcttccagaggaacaatcaggcagcaacatttgctgtttagcaatattcatggttctgcagcctccgctgctgatacctaggcaaacagggtctggagtggacctccagcaaactccaacagacctgcagctgagggtcctgactgttagaaggaaaactaacaaacaggacatttgcaccaaaaccccacctgtacatcaccatcatcaaagaccaaaggtagataaaaccacaaagatggggaaaaacacagcagaaaagctgaaaattctaaaaatcagagcgcgtctccccctccgaaggaacgcagctcctcaccagcaacagaacaaagctggatggagaatgactttgatgagttgggagaagaaggcttcagacgatcaaacttctccaagctaaaggaggaagttcaaacccacgcaaagaagtaaaaaaccttgaaaaaagattagatgaatggctaactagaataaccagtgtagagaagtccttaagtgacctgatggagctgaaaaccacagcacaagaactatgtgacgaatgcacaagcttcagtagccgattcgatcaactggaagaaagggtatcagtaatggaagatcacatgaatgaaatgaatcaagaagtttagagaaaagagtaaaaataaatgacaaagcctcgaagaaatatgggactatgtgaaaagaccaaatctacgtctgattggtgtacctgaaagtgatggggagaatggaatggagccacgttggaaaacactctaaaggatattatccaggagaacttccccaacctagcaaggcaggccaacattcaaattcaggaaatacacagaacgccacaaagatactcctcaagaagagcaactccaagacacataattgtcagattcaccaaagttgaaatgaaggaaaaaatattaagggcagccagagagaaaggtcgggttactcacaaagggaagcccatcagactaacagctgagctctcggcagaaactctacaagccagaagagagtgggggccaatattcaacattctcaaagaaaagaattttcaacccagaatttcatatgcagccaaactaagcttcataagcaaaggagaaataaaatcctttacagacaagcaaatgctgagagattttgtcaccaccaggcctgccctacaagagctcctgaaggaagcactaaacatggaaaggaacaagcagtaccagccactgcaaaaacatgccaaattgtaaagaccattgatgctaggaagaaactgcatcaagtaatgagcaaaataaccagctaacatcataatgacaggatcaaattcacacataacaatattaaccttaaatgtaaatgggctaaatgctccaattaaaagacacagactggcaagttggataaagagtcaagacccatcagtgtgctgtattcaggagacccatctcatgtgcagagacacacataggctcaaaataaaggcatggaggaagatctgccaagcaaatggaaaacaaaaaaaggcaggggttgcaatcctagtctctgataaaacagactt

SEQ ID NO: 860 - DNA, 1484 bp, Homo Sapiens
ggcaaagttcagcatcatcctctctgctgaaataaccaacatggtgctcattaattggtcatgtgagcactaaggataaccaccctcccctcctcaatcaggatcacaaatgctagctttcatatggatttcaagctgggtgaaatgactttttttgcttgtaaagaagaaatgatgatggaggtctcatcaggaagtgatgcagaagactgggacagacgggggtttcaccatgttggccaggatggtctcaaactcctaacctcgcgatccacccacctcggcctcccaaagtgctaggattacaggcgtgaggcactgcacccagcccatcataagtattttcatgtatcatcatgtattttagaaaatggtattattgactatatatcagttcattgtgtgcacacattttatttaattaatttgctcttttcagttatttagttttctttttttgttattataaatttcatagtaatatatgtccttatacataaatctgagtatgaatctaggattatttacttaaaatgaatttccagacacaaattgtggggttaaagtgggaggagcatttttaaagcttttgatatataccgctaaattgtcttataggaatgtataaattatgaaacaaccagctgtccatgtgagaccatgcatttccttatccaaatgaagttaaagaaattatttgtcagcttttttggtggtatgtggtaactccttttcctgatttgaatgtttttctagtactagtgactttttacaggtttttcttatgtttgttggttgagtttttttttttaatgtctatgcctatcttagtatctatgcctattttaattttttaatgtctatgtactttcttttggagcatgttgtatgatattttataaataaaaggtgttaactctgtcattatagtgtaaatatatttcccaatatgtttttaaattttcatttatgatatatagaaattttaacttttatatattaaaaatatctatatttaaatgactttgtccagatgtagtgactcatgcctgtaatcacagaattttgagaggctatgtcaagaggattgcttgaggccaggagttcctggccagcctggacgacacagtgagacccctatctctaaaaaagttttttttcaaacaatcctgccacctcagcttcctaaagtgctgggattacaggcatgaaccattgagcccaggttctttgtaatatcttcctccacgtttttacgtatcaatcctgcattcaaacatttactcattctgaaacaaattttagtatatgttataaggtattgatccaaatttttacgtttataaatagttaacatctccaaaccatttattgatattaatttcaccttcatcatattgtaaattatagttttgattttcctttttgacaatgaattatctaagaggatactttagaattttcaaacttaataaaaaactttt

SEQ ID NO: 861 - DNA, 2023 bp, Homo Sapiens
gcgcacgcgggaactgggatctcaaccccagggctaggtgcctcctcccgctgctttccgccagctgcggggtgtgagattaatccccgccgattagcgccaggtgtactaagcgctggatggttccctgaccagatgaaacatcagccgatgttctaatgccggtcccctgggcgctgtccccgagagggaaaacctgttttctgaccccggctctagtcggcctctggaggtctgcagctgggttattttacctttgaaacggacgacacctgccccgtgcaccccagcggctcctccacacggagagatggtgtcagtcaaaggccgtctagatgacgagtttatgaaattgttcctggcccgtgccgggcacgaccttgcagagagcccagaagatgaaaccccagccctgccaggagctcacctgctaattaggaggacaacgaatcacctcacctccctagactttgcttctcctttattcagtgagggattggactagctggtccttgaggacttttcagaaagtctggttctgggagatgaccaatgggatcatcttatgctatgagctttcctggaatgacaggtaattggtgcgccttcccagcagggtcagggagagttgctgggacttgaaggaaaggcttttggggagaggagccagtgttacaaactatcgaaaagcttggaggtgggaaatttacaaaaggtgattccagggtcagcttttttgtcacctgcttccgacttcggcagtttggagagggcgagtaagtaatacccttcagggtcttgggatgtggcccagcaaaatccttagagggactttgaagtcttagttttaagtttagaattaatgggcagagtacttaaatagccatttctccaaagatgtatacaaatggcccacaggcccataaaaatgttgcattccaccctataacatgtttttgcataaaaaagttttaaaataactgttgtctggtaaattgacacctctggaatagaatgtatgctaggttttttaccctactgcttcaaaccccatcctacacacacactcctagggtgtgcatcatccagtttaagaagcacccttggagaaacaaagttgatagtgtgtccagaattgatgggttcttggtctcactaacgcaagactgaagctgcagaccctcgcggtgttagtttttaaaggcggtgtgtctggagtttgttccctcagatgttccgatgggtttggagttttttccttctggtgggtttgtggtcttgctggctcaggagtgaagctgcagaccttcgcctgagtgttacagcttttaagacggcatgtactggagttgctagttcaccccggtgggttcgtgtatctcactagcttcaggagtgaagctgcagacatttgcagtgagtgttacagctcataaaggcagtgcagacctaaaaaacaaaaagaacaaagcttccatactgtggtaagaaaatcctagtgagttactgctgctgtcttagggcagcctgtgtttattctcttctctggccccacccacatcctgctgattggtccattttagagagagctgattggtctgttttacagagagctgattgagccgttttgacagggtgctgattggtgcgtttataatccctgagctagacacaaaagttctccaggtcaccactagattagcgagatacacagtgtcgattggtgtatttacaaaccgtgagctagacacagagtgctgattggtgcatttacaaactttgagctagatacagagtgccgattggtgcattcacaatcccttagctagacaaaggttctccaagtccccaccagattaactagatacacagtgccgattggttcattcacaaaccctgagctagacacagggtgctgattggtgtgtttgcaaaccttgagctagatacagagtgcccattggtgtatttacaatcccttagctagacataaaggttctccaagtccccactagacttagga

SEQ ID NO: 862 - DNA, 22622 bp, Homo Sapiens
gttccttccggcgtctccaaccgccgcctgctcccgccgtccacccgcgcgggccgcctgggacggggagggccgggctgcgggcttttctcccttccagagtcctgcgcccgcccaaagcccccccgcagaggctgggcagcggctccgggaagtggacgccgtttgcccagacggtgggctcgactgaagcggcgcggtcccgggtggggccgcccgggaagaaagtctcccagttaagctgccgtgcaattaagatggttgggtttggattgttgtacttttttttttgttcgttgcatttttaggaacaaaaaaaaaagcccaacccttcacaccacttcatccgcatctcaagaccagaagccgaccccagcggcttggggaaatggagccccgcaccccacaagggggagggtgggacgggcacctccgcactgcgcggcctgcggagtcaccgattcgcgttgggagcgcgccaggagcgccagggctctagccgggggctccgggcaaggcgcaaccagaaaagggttcagtatcccccatcacccccacccccaaccgtaccctctttctttgcgggctttaggcaggacaccagagacccaattctatttaaaattctcttttaagaaaaggaacgcctgtttttgcctttgggggaaaggatgaactttcaaattggctttaaattatccaccactaacagttactcagtcgataacctgactattctgacgtccacctcccgtttgaggaccttgcccaatagcaaacgtactaagcacttaaccagtgaacggtgtgaaggatgcaaacatggatgatgaaggaatggctcctccagaatttacgatcttgggagaagtgaggcgagtatagaatctcagaacacgctgtaggattgagttcgatcccagttgaggaagtttgggtttggggaggaaataggttattttggagaaacggtattcaaaacctaccataaatagcagtacagcccgttgactaataatgcttagcccaacccccgtaaaaagcccctggccacatccgtctcctgagattcccacttctctgtgtgcatctcccttcctgctataagaaacctaactttgccttcgtagaacacttcttttaatttctgtcattcagtctcataacactgtgtaaaagaaattatgatcttcatcctatatagatgagaaaacaggtgaagtgacttttccaaggtacaaaagcaagaggcagagctgaggctaaaggcagcttccagatatgggctctttctacagcaccataactgtcagtgacaaaactgcaccccagtaccttactaaatttagtgtttttaggccaggcacggtggctcacgcctgtaatcccagcactttgggaggtcgaggcgggcagatcacctgaggtcaggagttccagaccggactgaccaacatggtgaaacctggtctctactaaaaatacaaaaattagccggtcatggtgccgtatgcctgtagtcccagctacttgagaggctgaggcaggagaatagcttgaacccgggagatggaggttgcagtgagccgagatcctaccactgcactccagcctgggcaacagagcaagactccgtctcaataactaaattaattaattaatttagtgtttctaaaaaaacaaagtgatctgtagaaacatctcatttatttgttgtcattgtgtgttgattgattttgagacagggtctatctctgtcccccaggctggagtgcagtagcatgatcatggctcactacagcctcaagcccctgggcccaagttatcctcctcccttagcctcccaagtagctgggaccacagacatgcgccaccacgcctggctaattttattttttgtaaagatagagtctcactatgttgcccaggctggtgtcaaactcctgggctcaagtgttcctcaggcctcagcctcccaaagtgctgggattacaggcgtgagccaccacacccagccatatggaaacatttcagatatcctaatattaaaatgatatttcacaagactggacagttattaactcatgtgaaaggaaaatcttggggccccaaaatcactaagctaaaggaaaaagtcaagcttcggagaactgcttagggcaaacctgcctcccattctattcaaagtcatccctctgctcactgagataaatgaatatctgattgcctcctttggaaagggtaaccagaaactcaaaagaatgcagtgatttgcctcttatctccctaaaacctggaagcccgccccctgttttgagttgtcccacctttgcttcaagtcgtcccaccttttctggactgaaccagtgttcatcttacacacgctgattgatgtctcgtgtcttcctaaaatgtacaaaaccaaactgctctgaccacctcgggttctgacctcctgaagctgtatcatgggcacgcatcctcaaccgtggcaaaataaactttctaaattaactgggacatggctcagatttttagggttcacacgcaaaacccacaaattatccttaatataattatataatatatatttatgtagttagatctggttggtggtagatactaatacacttttgcccaactaagtgtaaaacacattaaatctgtatagcaatctctagactattacacaaaattaactactaactagaaaacacagtatattaaattctcttaagtgtggaaaaatggagaaggaagaataaccttttctctcctcccgtggtcctaatacacagaacagcgactgggaaactgccactagaaaaagatgactgtccaactaaaacctgcatacacagctacatccttccctggaagagcacagtggaactagatcctagtacagatagcacagggattgtcaacattcttgtcacactgaaatttccttctactgatctccaaagatggtgttttgccatgttgcctaggctagtctcaaactcacagactccaatgatccacccgctttggccaatcaaagtgctggaattacaggtatgagccactgtgccaaaccaagaaatttattttcatattttgagatttgttattgaaaattacagatttttaaaaatgcaataacatataaaagtacatcatatatggttcagtcttactgaaccatttaatataatattttgtcaaagtactcaatttataaataaaatataaaaatcattaattgtgacaaatattttcctaaaatcttccaaaaggaaactatatatgtgtgaatacatataatttgcttgtatatcaatcatatgtataatttatctttctttttttctcagacagagtcttgctctgtcacccaggctggagtgtaatggtgcaatcttggctcactgcaacccccgtctcccaggttcacgcgattctcctgcctcagcctgccaaggtttacaggtgcctgccaccacccctggataattatttgtatttttagtagagatgggatttcgacatgttggccaggctggtcttgaactcctgacctcaggtgatccacccaccttggcctcccaaagtgctgggattacaggcatgagtcactgcgcccagccaatttatcttgttagaatgattgtaactgtattctgtaaaaggccggtgttaatagattgcttagctacattttagagtatgcttcactagagccttaaaaatcattacatatatatcctctgaaatgtattattgctttgatattttaacaatgattaattacattcaattatgacaattaaatgtttttctaaattcccatatatgtagaattttattttttacaaacagtaactttatgagggccttaagaaatgattaatttaggctgagtgtgatggctcacgctggtaatcccagcactttgggaggctgaggtgggcggatcacctgaggtcaggagttcgagaccagcctgacaacatggagaaaccccgtccctactaaaaatacaaaaaagttagctgggtgtggtggcgcatgcctgtaatcccagctactcgggaggctgaggcaggagaatcacttgaacctgggaggcggaggttgtggtgagccgagatcactccactgcactccagcctgggcaacaagagcgaaactccatctcaaaaataaaaataaaaataaaaaataaatgattaattcagctaaagactaatagatactgtatatttgcaattgttggagagctcgatttgtataaattgtttattttgaatctttctgagctcactcaccattatgtgctaatttttaccctgagaagtgtcaattatgataacattttggattagaaaactactttcatcctgttttatgggagatttttagagcatttttagagcattctataaataaggatacatcatggataggggttctgcagttttcagtagctggtagatacctgtaccttaagcacactctttgtcttaaataaagacaatagaccaatgcatagaatttttgttctgaggatctagactttatcagatacttcctatacagcattgcataagacatagatgcttcattgtttttaacatgagcccagttgagtctctctaatattaaagcattgggtaataaatgccttgttaaaatgtgtttatcttataatggtcttgtttgtaacactatctggattgttgctagaatgcccccagatctccagaagtgtggaatttgatctaaagcaacccacacccctcccagtcaggcaaaagacacagataattcagaagatggttgaaactaattatacaatatcagtgcattttaagcattttgtgaatgtcattggcctccatgttgctaactccaacagatattttttcagttctcattttccttgatcttttggtagccttcaactctgagtaccactgcctcctttttaaaaggccctcttttcctctgccattagtaacactaaactcactcctggcttttcttcttcagactcaggaatacttgctgggtcatccttttctacccagcatttaaattctggaattcaaacgctcagttttaggaccctcctaggagttcagtgatcatttattgactcttacaatccctgtcaaaaacacaaactgtttgcctattgttactctatttttaaatgatgaaaactgaattttaatacttgagaggcatgtcacttcttcctctcccacaatccttactctgtgtaggcatttgggttagcccttgtgttacccgaggctcatactgcttccagcagcagggctcctgcacccttagttccttccctaacgaggccctcaccagccacctcccatccccatcctccaaccatagcacaactgacagtctcaggtgagctttcccagatgtttctggccaattaacagaccctgttaatcatctcataccatctaatactgctcttccatcatgcactctgcagtttgttaaatttatttgtgtaattatttgattaatgtttgtctccccacttgactgtaaaccccataagagctgggattgtgtgtgtgtgtttgtgtgtgtgtgtgttttctcatcattgcattactagcacctaacccagtgatttcatgaatgtcttaaggaagtaagagtctcctatttcacggtattgatgtatttcagacttctaaaaatttgctgttgagaccagctgaaatggtaagtactctgaattttaatttactcaaaataggcacttcaatacattttactttatcaaaacaaagtagctttccatcctttctttacacagcaagtattaccatactcctatagtcaaactcttcctagagtttacacagaagtgctggtagtcttcattttcacagaacaacatagcataactcttaaaatgaggagaatttcctgaagagtcatcagagaattattattattattgttattattttaagacagagtctcgctctgtcaccaggctggagtgcagtggtgagatctcagctcactgcagcctccacctcccgggttaaagcgattctccagcttcagtctcccaagtagctgggattacaggcacgcaccaccacacttggctaatgtctgatgtgctctcactaaggtaagagtctatttatgcctgggagatagaggaagcctacagtctggaagcccaaagcagtgctcaggcccagtttactggagtatttgtagcaaagtgatgcttaattctcatttgctagtgttctctattcatccgttttccttgggggatcttgggtttggttgtgtgtggctacagcgtagggatgagattctatcatctttgtgttaggcggctgtagtgcctttgttttcgtttttgttttgttttttgtttttgtttttatttttgttttgagacaaagtctccctctgttgcccagactggagtgtagtggtgcaatctcggctcactgcaacctccgcctcccaagggcaagtgattctcctgcttcagcctccgaagtagctgggattataggtgtatcccaccatgcctggctaatttttgcatttttagtagagacagggtttcaccatgttggccagggtggtcttgaactcctgatcccaggtgatctgcccgccttggcctcccaaagtgctgggattacagacctgagccaccatgcctggcctatagtgccttcttttttttttttttaacacagagtctcgctctgtcacccaggctggagtgcagtggcacaatctcagcttactgcaacctccgcctcctgggttcaagcgattctcctgcctcagcctcccaagtagctgggattacaggcatgtgccaccatacctggctaattttttgtatttttagtagagacggggtttcaccatgttagccaatatggtctcaatctcctgacctcgtgatccacccacctcagcctcccaaagtgctgggattacaggcatgagccactgcacctggcctttatggtgtcttcttaaggtgaatagcacctcaccctgatttttaacatgtagcattttgcattgcactatatctactgaagatgttaatcacttctgcatctttccatagctttcaacatgatacttttcaatggctgcataatttcattaatacacctaaatgtaaggtgtatgtaaaggaaaaagacagtgaaatccttgtgtggttattcatacaagtccctatttagggagcaaatgattatgtggggccaggatatcatggctgttaaatgactgcccatgtgacactgggcagggagtgcctctgatactaggcaggctagagatgatgtttttggaaccaggagggaaaagctagaaaaagtggcataaatataggaaaagaataggaatttcaagaattgagtatagtcttaaatgttgaccaaaaaaaagtaaattgagccctgaaaaatgatagaattttccaattaggttactaatgattttaccagcctggccaacatggtgaaaccccatctctactaaaaatacaaaaacattaacgaagtgttggcacacgcctgtaatcccagctactcaggaggcgaggcaaaaaagtcacttgaacctgggaggcagaggtgatagtaagccgagattgcgccactgcactctagaccgggtgacagagcaagactctgtttcaaaaaaaaaaagaaaaaaaaatcaattatgttactaatgattttaggaaaagaaattttatctctgttttggggccagaggtagggaaagggaaagggttaaaattaagtatttactggccagacgaggtagctcacatctgtaatcccagcagtttgggaggctgaggtgggcagatcacaaggtcaggagttcgagaccagcctggccaatatggtgaaacccccgtctctactaaaaatacaaaaattagccaggcatggtgtcacatgcctgtagtcctagctactcgggaggctgaggcaggagaatcacttgaacccgggaggcggaggttgcagtgagccaagatcgtgccaccgcactccagcctgggcaacagagcgagactccacctcaaaaaaataaaaataaaaaaaataagtatttactatctgccagggactatgttggaaatttttcttgcattacctcattttacaagtcacagtggggaaactgagggttggagtagttcattaacctgcccacagtcacatagggcaggttacccaggtcagtcttcattccactgcagtcagaagtgaatgaagattaaggaagcagagacaaggagtatgaacaattctttctggaagaatgatggggaaagaagagaaaggattgataaagtatagtgacagataatctctgcttttataataaaaataaagctcagctcctctgaggttgacactgaaaaagagtaactgcaggggccagaagcagagagaccaacaaaccctggcccctgccctggagattcatctttctcccgagactctccctctgatgattttggctccatcgaagcctccttgggtcatttcttccttcatatctgaggtacaggcaatgggatgacaaaaggcatttttcaacatctctccacaactaagtcaaagctgaaaagtttaaaggacttttctgaacatgagggcaatgtttcccaaccttttgaggtcatagaaactgctctggacaccagtttaaatatacagaatcttgggggacatggattttgaaggtctgcagtgggagcctgggaaaaggtattttaaagtaataccggttacccttaaatttctgcaagttctagtatcactgtgctggcaagtaacaaagagaaataaacacagtagcataaagcctggcatgtagcctggctcacaaaaaaaaaagacctgcttataaccccattctggagtcctcacctgcccctgcaggtttgatgctatcttgacacatgctggctatttttatctcctagaaaacaatctaggccccacagatggaggccctttgccaaattataaggtggtgggggaggaagggaagaggcttcttcactcaataatttttccttttctttttctttttcttttttcctttttttttttttttatggagtttcactgttgtcgcccaggctggagtgcaatggcccaatctcagctcactgcaacctccacctcccgggttcaagcgattctcctgcctcagcctcccgagtagccaggattataggcacccaccaccacaccctaattttttgtatttttagtagagatggggtttcaccatgttgaccaggctggtcttgaactcctgacctcaagtgattcactcgccttggcttcccaaagcattgggattataggcatgggccaccgtgcctggccactcaatatttttcaaagaccaggttgttagtctttttattttttgagacagtgtcttgctcagttgcccaggctggagtgcagtggtgcagtcatagctcactgcagcttctaactcctgggctcaagtgatccaccttcctcagcctcctgagtagctgggactacaggtgcatgtcaccaggaccagctaatttttttttaacttttttttttttttttttgtagagacaaggtctcactaggtggtccaggctggtctcaaacttctggcctcaagcaatcctcccaccttggcctcccaaagtgctgggattataggcatgagccactgtgcccagcagttgttagttctttaccagcacatgatgtaagtcttcccgacacagacaaggtctagcttggcccgccagactgcttctgccttgttgtccctccagcagtgagtggcagaatgatggcagccagctttctcccacaggctgctcagtctgactacgcattagtattagggaaggtgaccatacatgttcaggtttgcctgggaagagtcctgaccacacctttgagcccagactctcctccacttagtctttcattttcatttattaattcccagtttggatgataaattacatagtcaccccgtctgtgaacaaaagagctagaacaaaaatacaactccacaaaagcaagaagtggactgccaacaacttaataacttccatggatcaaggaaatcatgctgtgacaccacacacatcatttcaactcatcctcacagcaaccccacaagggaattttggagacatgaattttgcagataaggaaagtaacagggtgaagtgagttggccagggtcatccaactatgaggaacagaggtagggtcaaagatccatctgcatgagcccagctcctgctctagatgggcctacctgcctcctcagggcatgtggtcacctcacccaccaattactgactgcgttaagaaatagaattttaccaagaaagttgcttgatttcaacatgaaagaaatactctcaatattcatatttttcatcttaaatttgaaagtagaaatctgctttctgcagctgtctaattcagctcttgtttctgtaacctagtttgaaagaagcaactaaagaaagaaactttgaaagaagcttccaaaagaagcaaccaagtctacaaaggcacagtttgactcaaatggatccaactgattagcaaatggaaaataacatggaggaatatattttgcatgacaagcatagcagctccaagtcatccctaatgaagccaaaaatttaagtgcaacccagagaatggatggttcagaatcttttttttttttgagatggagtctcgctctgtcacctaggctggagtgcggtggcatgatctcggctcactgcaagctccgcctcctgggttcacgccattctcctgcctcagccttccgggtagctgggactacaggtgcctgccaccacgcccggctaattttttgtatttttagtagagacggggtttcaccgtgttagctaggatggtctcaatctcctgacctcgtgatctgcccgcctcagcctcccaaagtgctggaattacaggcgtgagccaccgcgcccggcccagaatcttttttaaattttttattattattattttttctgagatggagtccggctctgtggccaggctggagtgcagtggcacaatctcagctcactgcaacctctgactcccaggtacaagtgattctcctgcctcagcctcctgagtagctgggataacaggcacgtgccaccacgcccagctaatttttgtatttttagtagagacggggtttcaccatgttggccaggatggtctcgatctgcctaccttggcctcccaatgtactgggattacaggcgtgagccaccgtacccggcccagaatctttgccttttgtttgcatagtttaatcttctaaaccagttgctttcccagaaaaggtgacttaaagtcatagcctttgtgttcatcaccatactctccatagttttacaaattattcagtttatttttaaaaggggtaatttttaaaatttttatttttaattccgaagcattccttttaatacattctcttgagggaaaaaaaaaatcacacatagtgattgtgtgtggtagtgattatgtgtggcctaagtggcaattgatcaataccccaatctcaagcctgtacattgttactggttgactggttggttgcctggtgggctttttgtccttccagatgtttttctaccttctgccttttccaataaagcttccattataggcgtattttccttcttccctgcataccccacagaaggaaagctgctaaaatctcagagccggaaagttccaagggggctgcagcagcccctctctcctagtttttgttcacccttactaagagcaaggcagctcaagtcagattgctgcatgtgcattttgactccatcattgagcaagttcatttattcactattcattcagcaacatttgagcacttctctcttcctccatggccaccattctagcccatgccaccatgatttattgtttctgtctttgatgctgagcctgtctccctacagccacatggtccttctacacaatcatatcactgctctgcttacatcccttccccagcttcccacccacttagtccaagtccaagtcccttggttgggagccaacagattcctacaggtctgccatctccccaacccatggccaagccatctctgacttctgcctgtgcgctctactctagccacatcggcctccttgctattcctcaaacatgccaaactcgcctcttccttagcaacttggcatttttttttccctctgcctagaatgttcttcctccaaagtctacctggctcactccttcctctccttcagttgttctgctcagatgtcaccttcacgggaaagtcttcctggccatcctattacaaatggtggcctctcactgcctcacagcactccctggtctcctttcctgcttcatttttctccatgccacttatcgccacctgacatactttgtatttctttgattactgtctcctcccactagaatgtgagctctgtacagaagcaatatgctagcagctataagagtgtctggcacatggcaggccctcagtaaatattagttgaatgaatgaatgaagagtttgcatgcagcaatggggagccagatcaggtacggccttgtaagtcctggaaaagactttgggttttattttaaatatgaagagaagccattggagagcacatcatctgatatacagtttagaaagatcactctgggctaggagtggtggctcatgcctgtaatttcaacgctatgggagactgaggcaggaggatcactataggccagtagttcaaggccagcctagcagccatgcacggtggctcacacctgtaatcccagcactttgggaggccaaggtgggcagatcacctgaggtcagaagttcgagaccagcctgggcaacatggtgaaaccccaactctactaaaaatacaaaaattagccaggcatagtggtgggcgctggtagtcccagctactcaggaggctgaagcaggaaaatcacttgaacccgggaggcagaggttgcagtgagccaagatcacaccactgcactccagcctgggcaaaagagcaagactccatctcagaaaacaaaacaaaacaaaacaaaaaaccagcctaggaaacatagcgggactgcatctctacaaaaaattaaaaattagccaggtgtggtggtatgcacctgtagcctaagctgcttgaaaggctaaagtgagaggaccacttgagcccaggagattgaagctgcaatgagctatgaccacaccactgcactgcagcctgggcaatagacttagaccctgtctcaaaaaacaaacaaacaacaacaactaaaaaaacccaccctgcccattgtgtggaaggaagatggtactaagggtaagagtggccccgggggacagtttggaggctaatgcgacatctaagcaagaaagataatgaggacttgagctagggtaggaaaaaaggtcatattttaaaaatatattttggagttatagctgacagaacttgttaataaattggaggaggggccaaagaggaaaagagaaatggaggataacttccaggcttggggcctcaatactgaatctccctgagcctgtttactgttctgtaaaatgagggtaactgggcccccccaccatgggatctctgtgaggaaggaggtagaggatatagactgcccatactgacaggcacatggtaaaccctcagtgcacagtagctcttatcattgccccagtgatgactgtatttcccctgcttcatccataaataggattacagaaataaccaccccatagagactggggaaaaaaacttcttgtagagtgtaccctcccctcctaagggatagacttgtactttaacagaatacttaacagtagtgttgaaacatgttatttgcacacagataaataaaaggattcctcatatttcaaaagaagtgtaacactgttttaagtagtgtttgtccattcaatacttaatagcaggagtaactaaaagctgaaattacaaacccctgctgattaaaaataaatcaaaacataagatataaagcacatgtgaaataataatgatttttttttttttttttgagacggagtctcgctcttgtcaccaggcaggagtgcagtagcacgatcttggctcactgcaacctccacctcccaggttcaagcgattctcctgactcagcctcccgagtagctgggactacaggcaccgtggcaccatgcccaactaatttttgtatttttagtggagacagggtttcaccatgttggacaggatggtctcgatttcttgacctcatgatccacccacctcagcctcccaaagtgccaggattacaggcatgagcccccgcgcctggccataataacgattttttttttttagatggagtttcgcacttgttgcccaggctggagtgcaatggcataatctcagctcaccacaacctctgcatcctgggttcaagtgattctcctgcctcagcctcctgagtaactgggattacaggcatgcaccaccattcctggcttttttttttttttttttttttttttttttttgtatttttagtagagacagggtttctccatgttggtcagggtggtcttgaactcctgaccttaggtgatccgcccaccttggcctcccaaagtgctgggattgcaggggtaagccaccgcgccccgccgcaacaatgacttttttaaaaaacaggcatttactgcattttcgtacactagaagctaaaataccatgctgtccagttcaaaacaggacacctggcaaccctgttcctaacagctttctgcaaagccaacacccagtgctttctggctgcattggcctgtcctcatttccccctggaaaacttgttttaaacagtacagataacattctgcctctattacaattagcagcttctctcaccaggttatctagtgtggcaagtgctagtgcggagtcacttagtatcttctttcaaaacctcccagtggctgccttcaggtagcatgtgaaaagctgctcatggggaattcagcagctgcttcaggccctccagggcatttcttgctggcatcttctgcctcaccagatcgccctgattattagtgatctgggccccctacctaatggaaaaccagccactcttcttcccagccccaatggatattgatgaggggtccttaaatctgggatcctttcccctccttgcccaataattgaactcctaaaatccttttactacctgggaatctgcaaagacaaccttgaatttgaactggagctagaaggacttcctccgaacgaatttgcccatagatgactctctggtacatggtctctgttgttcaactttctctattctgaagtctagaagacacccttgcttctgaaagtggggcctaagaacctgcagcctcaccagggagcttggtagaaatccagaatctgaggcaggattctagacttattggatcagattctgcatttcaacaagattccccagtgacccccaggcatcttcaaatttgagaggccaggaaagtgctcaggccctgcccttcccttcccgttggctggggagaattcctgtaatttgccctgtttacgggtccttaatctccaacttcactgtcctcgctttccaaagaatcctgagtggcttccttccaacaccttatctgtcttcccccacgcccctgaagccagggcctcttttcttcaaggccaccccccaactcatctcaggctgaggctcctctcttgaggccatatcccatggtagcatttctttgagggctgcttttctgccgtttttctccccaggtagggcctctaaaaccgatggaagtgaagtgctacacctcagagctgctttagcccttagagctggccagggtctgagtgggcctctcacagggccacaggactgccctttcccccagcatgcctagaagctgagaccactcacaccacatgaacatgctatccttgttcctctttcctgccagcctcaacacaaccagaatacagcccaataatggctgcctacaaatgggaggcacccagggaagggagggggtgctgattaagaaccagcctggaggaggatcatggtttctctgaaacaagaaggaggtgagggttgatgcggaaggtatattagaaatgcttcaagcacttgatgctttgagggtttggggatttgagtttgggtttgttttttaagcttaacaatgtgaaaaagatgtcaaataacttttctgaactgtggcaatcagagccttgtccagaatcataacttaatggctttttggctctcaatttgatggtcagtttggctaaccaacactttttaattctgtgttatttattactcagttgatcccccccataatatgttaaaagcctacttccaacctgttaaaatgtacccttggagtgctgtccagattcaccattaaaatagtgtctttccagtcttatgtattttattcagcagttactacagtacttttttttttttttttgacaggatctcattctgttgcccaggctggagtccagtggtgtgatcacagctcactgaagctttgacctcctaggctcaagctatcttcctgcctcaggctcctgagtagctgggactataggcacatgccactatacctggctaatttttaattttttgtagaaactgggtctcgctatgttgcccaggctggtctcgaactcctgggttcaagcattcctgacactttggcctcccaaagtgctgggattacaggcatgagatgccatgcctggccatatttttatttttaaatctttctatttaaataaggagagggagagagagagaaagctctaggtgcattttttccaaatggacaccttgccatgttttcaacacacatctaaagcctgaattgagagtataatttttctgtagatacatcaccttgaggaattttataaacttcagtttcctcatctgagaaatgaggtagttggattagatgaactggctcatcaagtgagtataaggagccttccaaatttaagaattattaacatttcccggaagactaaccaggcaatttttcttctttaggtttgactttctgagatgtcatggcttagtattctttaagcaaattctggaatgttcttgtccctttggaataattgtaatgtggatttgttctgtgcaactgatgatattctaatgtgtttgggcaggtttaagtctaaatttccaaagtctcacacctgtggttttaccaaaaaggtactgctcaaggaaaccagtgatgggcaaaggatgcatggtatagctatgatgcaagagcgccctctgcaggccatgcgaagatgagtctctttcttaaagggtagcttttccgctctttgtgtagagtacaacccttcccttcctcctgtagcattctcatcaagaaacatttgtttagtgcttaccctgagctaggcacagtgtgcttagggctgggaacacaaaaataaaagcatcctaggcttaaaggatctcacggtctaatggggtacatcccaatcagatcattataatgcaacctgagaggtgtgtcactggagctgtgcctcatgtccccattagtttgcaatcacaagttgcacacaagagccgaaatcaaactgtacagtacaatgcttttttgttaggagagaaggactggtgactcaccctagcattttctctttgcacagaaacagatgccctgcccagaagcaacacggctaatgggtgccaccgtggagacccaggcaacctgagagtagtcctgacagccagacctccagggtggaaatgggaaggtctacagagaaagtgggagacatgaaactaaacaggaatgatacattgacaataaagaacatgaagagatggttcctggacactacaagaaacctgtggtcccagctactcgaagactgaagtgagaggatcacttgagcccagaaggtcgatgctacagtgagccatgatcatgccactatactccagcctaggtgacagagcgagactccatctcagaaaaaaaaaaaaaaaaaaaaggaaaggaaagaaggaaggaagggaaggaaaggaagggaaggaagggaaggagggaaggagagagggaaggagggagggaaggagggagggactggaagaggagaaggaggagaaggagagggagaaggagaggaaagaagaaagaagaagaaagaggaaggaaggaggaggagggaagaggaggagaaggaagaaggagaagaaatgagacaaaggagaagaaaggagaagaaaaaggaagaagaggaagaggaagaagaggaagcagaagcagcagcagcagcaagaagcagcagcaccagcagaagcagatgcagaagcaacagcagcagaagcagcagctgaagaagcagcagcaagaaaggaggaggaggaggaaggggaggagggggaggggaatggggaggaggaggaggagaaggcagcggcggcagcaagaggggactggtcccagcagggtaggaatctttagatggttattaagaaatggaatgaataaaatggaaattgatgcggttggctgcacatggtggctcacacctgtaatcccagcaatttgggaggctgaggtaggaggatcgtttgagcctaggagttcaagactagcctggccaacatattgagacccccatctgtaaaaaataacaacaataaaaaggaaattgatggagttaaaacaaaggtcttaacgtaacactaccctgaaggttgggtgaaccaaagggagccccttttggtcctccaacattaaagggccccaaaccagtttgctgtatttctcccagtttggagaaatttaaaaagctaaaaggcagcagttacaatgaaaaatctgatctgaatttgcctggggcaatagtcgagcagactaaccaagataaagattaacaagagggccagggtcctttgggtcaccccttggctgggtacccaaagacttttacacaagagagggtaaatggtctaggggtggagaagaaaagttcctgaaactaaaacagaaaaatgtaggggtcgataggactatgaaagttggtatatttgaacacttcatgtgaagtagttgcattttttatctgattttatcatgggaatgaacattgtatctgtgtgggggactgttttccctacctggtactgtaaaagagaaggcatgtaaatcgtcccttcaagcaatattatttggacatgctaagctggaaccagggagactgcccaggcccacacagtgcagagtagaagctacggtgctggtagggacaaattctccacttgataaccctctatggagcatttcctggagcttatggcaaaagcctgtgggcacctcccagcaacaaccactgggactttggactagagaatttccacttgaagggcatttactgactcgcaatgaaacatttactgaagccaccccactgatacctgaaataggcatgctgtctcagatgatgtcagaggaacattctaatggggatggcagtgcccagaagagttccatgacacaatggaaatggtttatagaggatcatgctactcaaggcatgcagagaatttcttttcccctaggactgactctggaactgtgtgagaaactgctggattctacagtgccaaataaacaactttcaactgaccaaacaagagcttcttggtttatggatggcaattccaaggcacaaaatgctaggaagaactgttctgtttctcagtaagagagacagaaactggctatgggaaagatttcctggtgggaaggccctgaacatagctggcaagtgagactgatgctggcagccctgggggactacaaatggaataggaattcttgataggaatagacactgactctagtgcaggctttgcttatccaatggaagatgaaagtgttcagagtgccataaaaaaaaaattaaaaaaaataaacaacagaagatatttcaaggatttggatggctgaccatcatttcttcttcagacaaaggaacacactgtacagcccataatgcccaacaatgggcagagagatatcctccttagagtaatagtttgatagataagtagaatgggcaattaaaatattggttgtctaaaaccagggaagataaaagcatgaaagcctggcttatactcaacgtggttgaaactagagtgctcctgttagattttttctctgtttttctggttgatctgggaaaagggagtggggagaatgctgagatgactacgcaggtctcaccaagaaaggagtacactggtaaaatgacaatacatttttctttcttctcaaaatcacctcaaaaaattttttctcggccgggcacagtggctcagcctgtaatccccgcacttcaggaagccgaggcaggcagatcatgaggtcaggagatcgagaccatcccagctaacctggtgaaaccccgtctctactaaaaatacaaaaaattagccgggcgtggtagcgggcgcctgtagtcccagccactcgggaggctgaggcaggagaatggcgtgaaccgaggaggcagagcttgcagtgagccgagatgatgccactgcactccagcctgggcgacagagtgagacactgtctcaaaaagaaaaaaaaaaatttttttttctctcccctacctgatgcggtggtcccaagaccacagctgcaactacaagtgctagaacagcaagggtgagttctaggcaaaaaagcctatgtttttaaagctatgtcaaaatttctaagggcagatgggggtggattgtgccttcaccccatctagcaaaattggggctaagagtgaatgcagctatattgcctggtgttgaaaagagctcactagttctgtacctgtgtaaccttaccctatgtgaatgggagtgagatacttgctagacctgtattgaggaggagatacttgctagacttgtattgctacctgcaatctagaccagcatagtggtgattctaatgtcccttccaaaggtgaaaaggtttgggtattaatggacagaaggaaaaataatagctgagagtaaataaataaataaagctgggcacattggctcatgcctctaatcccgaaaccttgggacatcaaggcaggaggactgcttgagcccaggagtttaagaccagcctgggcaacactgggagaccttatctctacaggaaaaaaaaacaaaaacaaaaagtagccaggcatggtagtgcatacctgtggtcccagctactcaggaggctgaggtgggaggatcacttgagcctgggaggttgaagctgcagtaagcagagatcatgccactgcactccagcctatgtgacagagccagaacctctctcaaataaataaatgagttattaattgaggaaaattcaatatcacattaacaagtcaaaagagtctcagggcaagagatgacattttctcgtagctcaattattccagatgcctgaaaaggtgaagctgtgtatttaccgaggccacttctgcttttggaacctgacaagattgagaggaaacctgtaaacccgagtggcctcatcctgggaatcattcgaacagtataatgggctggattgattattaatgattgtgtatgtatgtatacataatcattaataaaacatatattttatgtaaaggatccatggttgaaaaccagaggatggcgtgtggtgttacgctatatattggtttttgtccacagttcctggctccaactcccatagtgcttgttacagttttttgttagaatattgggtgggttagggctgggcacggtggatcacacctgtaatcccagcactttgggaggccgaggcaggtggatcacttgaggtcaagagttcgagaccagcctggccaacatggataaaccccatctgtactaaaaatacaaagttagctgggcatggtggcacgcacttataatcccagttacttgggaggctgaggcaggagaattgcttgaaccctgggggtggaggttgcagtgagccaagattgtgccactgcactccagcttgggcaacagagtgggactccatctcaaaatatatatatatatatatatatttatatatgtgtgtgtgtgtgtgtgtgtatatatatacacacacacacacacatatatggtgggttaagactcaggggcaggcctctgacctcccaccctccttccactctaatgttccccaacctgtctgattatagatcttaagaccttctcatgagagagtaccaccctataccctgggggaaggaatgctgatgtcatgaagcttccattacaacccaagaggacaaggttcagtgagtttctggatagctggaggtttctggagggtggtgcatccagggaggtgcatccatagaagctccgcaccccttccc

SEQ ID NO: 863 - DNA, 8948 bp, Homo Sapiens
aaggttgaccatactctacagttgtgttttaatgtatattaatgttactaatgtgttttcagttttattgatagtcttttcagtattattgataatcttgttatttttagtatgattctgtaaaaatgaattaatactaatttttcagatgtatcatctcttaaaatactgtaattgcaatttaataattgtattgaatgccatcaagtttttttaaaaagcttatgcagcattagaggaatttattttaatgcacatttatattcaacatagacattaattcagatttttacttgggataaaacaaattctagttttccctttgttttgaaattacttttaaaatatgtctttacagataaatataaaatatattaagcattttgaacagagcttagaagacaatatttagtactgtttctgaatatttctttatatctgaaggggaaaagccatcaaaatatgtgaattaaatacctaaaattctggttgtcaaaacgtcacacttaaccataactttaaaggtagaaaaacccttacaagtgaccaacccactcattggatagctaaggaaacacaaaactcaaataatttgctacacatcacagattggggtcttagtcttatgtcttctaactttataatggtatactatttttttcatgtttttattaaaatgttttcttaaatccttagccaaagatttttgtttgataagtcaaaaataaggtcttgtttactttgtttacttttttgtattcaagatttaactcagagtaagaccaaattatcattgtagttttattgatataaaatgtcaacataatttaatttttttttttacttttttgtatttttaaaattttttattaaaaataaaagtagacagccaggtgcggtggctcacgcactttgggaagccgaggcaggcggatcaccaggtcaggagatcaagaccatcctggctaacacggtgaaaccccatctctattaaaaatacaaaaaaaatagccaggcgtggtggcgggcgcctgtagtcccagctactcgggaggctgaggcaggagaatggcatgaacctgggaggcggagcttccagtgagctgagatcgcaccactgcactccagcctgggtgacagagggagactctgtctcaacaaaaaaaaaaaaagaaaagaaaagtagagctgggcacagtggctcaagcctgtaatcccagcactttgggaggccgaggagggtggatgacgtgaggtcaggagttcgagaccaacctgaccgacatggtgaaaccccatctctactaaaaatacaaaaaattagccgggcgtggtggcacatgcctgtagtcccagctactcgggagactaaagcaggagaattgtttgaaccggggaggcggaggttgtaatgagcccagatcgcgccattgcaatccagcctggacaacaagagtgaaactccatctcaaaaaaataaattaaaatgtaaaaattaaaactaaataaataaataaaaatagagacagggtctcactatgctgcccaggctggtttcaaactcctgggctcaagcagtcttgccttagccttccactgtgctgggattataggcatgagccaccacccctggcctaatttaattaaaatctgaacaaaaggccgggcacggtggtggcttatgcctgtaatctcaggccaaggcaggtggatcatgtgaggtcaggagttcgagaccagcctgggcaatgtggtgaaaccctgtctctactaaaaataaaaaattagccaggtgtggtggcgggcgtctgtaatcccagctacttgggaggctggggcaggagaatcacttgaacccgggagaatcacttgaattccagtctgggcaacagagcgagactccatcttaacggcaacaacaacaaaaatctgaacagaaatgctctatttacgttcttttccttatctgtagtgttttaaagtcattaaacttaaaaatgatgttcaggagaagatgagtgtatttgcatagtctgtcataactctggtattattttgtacaaggagtgtgttagggttttcagttgtaaccatgcagaaaatctacaaaataaaagcagttgttaattagtcctttacaatcagaattgtctattttggaaatttatgaagtacttcagatgtaatttaagaaattgtatttgagccaagcgtggtggctcacacctgttatcccagcactttaggagcctgaggcaggtggatcacaaggtcaagagttcgagaccagcctgaccaacatggtgaaaccccatctcaactaaaaatacaaaacttagctgggcgtggtggcgcgcgcctgtaatcccagctactcaggaggctgagtcaggagaattacttgaatctaggaggtggaggttgcagtgagccgagatcacgccactgcactccagcctggaaaggaggggaaagggaaaggaaaggggaaagggaaagggaaaggggattgtattcgaggctgggcacggtggctcacgcctgtaatcccagcactttgggaggccgaggcgggtggatcctctgaggtcaggagttctagaccagcttggcgaacatggcaaaaccccgtctccactaaaaatgcaaaaattagccaggcatggtggccggggcctgtaatcccagctacatgggaggctgaggcagcagaatcgccttaaccctggaggcagaggttgtaatgagccgagatcatgccactgcactccagactaggcgacacagtgagactgtctcaacaacaacaaaaaagaaattgtattcaaaagcttaaggacctttttgtttaaattctaatttgaagatcaaatattatattaaagttctcattttttatccagcaatattttgttcccaatataccatacatagtggatagaactaaatgccagcgtttgcatggaaacactgtcttggtgcttttaaaaatcatttatcaatctcttaacttgttttatttcctttcaaccattgcatgaaagacttcaccaaatatataatttttgattccactaaaaatattccaggacttaacacaaatgcttagaatatttattgaatgaattacaaagtttacccaatactgtctaatattttttagaacaacccaggagttaggtgttttttgtttctttttctttgtattcctaaatgtatctgaagtcaggttttagaaaattatattcaatctgtcttctaaatgacaagaaaaaatttgcattttacatttaccagatgattctttatatctttaagtgctcttaagtgtgatgaaggatcatttgcagcttttatagctaaatgaagacttttcttatttttaatcctgacaatgaattaaaggaaaattgaaatatttgagaagtaagaaaatataggaaaagtgttgcattaaaacttatagtatgtacattccagtctcttcttagagaagaggaggtggcctgtcgatatctaatgaaaaataacatttaggaaactctcaacagtgctggatgttttatttgtagagttataattttgaaacacataaggagccagcagtaaaatgaaagtttataccttttagtgttaatcttattttggctttttgttttgcaaaacaaactgcacatagttatataggggtatatattaagttttcattttttcttgtttggaaaaaaatactaatctttttcatttaggtttcttttttaattgatgccaaagagttccaatattgaacatcttaagtctgttacttggattacggattgagtttggagcttactcagaggactacaggagagtatccaggaagtagcaagaaatgtggataattactgtaccttcctcatggaaaaagttttatttaaagtgttatttctcattgaatactatcaaaaaggaaaaaaaaatgacctaaacttttgagatagatttggctctagtaagtatttagttatatcacttgcatatctgggagaagaaataagagactatcatcagtacattcccatctactaaaaaaatttattttacacatgtcaagggattacttataacttccattttattactaatagcttgaacccttttaatgaagacctaactcctccaccagaaatttaagtttatgttcttactttgtttacttataaaatacatctcaggtatttcggatgtcttttttttttctaagcctatatgaaatgaaaaatatattggcaaaataaatgtttaaaccttttacgttaaaattactttgaaagatgaaaagttagtgctgtttttgtctacgttatactgaaattaaatgtttataatttatattttgggtttatgtataaatcatggaatttatgcaaaaatatgagtagtacagattctcctctaattctgtaggactttgaataatgtgatatttttcttataattggacccttgtgttttgaagaaatgccaactgcttgaagaatctccttgttatttgtattatttgctatagggttagatgttgagaaattctgctgacaaaaaattttaagccagttttacactaaatgttcctcagtctgattaatttgttattggatgtattctgtatctttcttttgtaatttgtaacttttatccacttagcacgaatgattctattaaagaaaatcattaggaagtggtagaaactttaaatcgccccagagtttgcctgtttccatattttattatcttataatcttcgggagtgcttacacttatggagctaacattttcagagatacagcttcttatagtaacactaaaactttcttcctctttggactgaatacctataattataactatatggtagtttaagtttccttgtgattagtcaaaaataccattttagtatgaagcaatgaagtctattatttgttgtcccataattgagaaagcttaaatacaccttttattaagagtttgtaaattctagcttagtctacacagatttttatatcaatttgtttatatttttattaatgtcatttctggaagtgtgaaaatgttaatgttcaacaagcaacattaaaaatagatttgaaacatttatatatagagaggtacacatttatttactgtttaggtactgaagattatcacttaataaaaaatatatatcccagcccccttgaagcttattaatcttgggggtagaggagtgagtgatggaatgaatggacaaaaaagctggtaggtactatatttggtatgtcagagagtgacaagttctgtggagaaaataaagcagggaaagtgagaatgatgtgataaaggtgtttgtaaggcagaagagagatatttttaaatagtatggtcaggaactaccctacagagaggacatttgaacaaagacctagaaacaataagggagcaaaccatgtaggtacctgggagaagacccttctgagcagatgaaatagcaaatacaaagaccctgaggctgaagcattttttgtgtgtacatggaacagcaaagaggcacatgtagctgtgatcaaatataaacaggaagaatagtagcttataggatcagagagttgataggggccatatcttgtagctgtttaagctacaagatatctgagctacagattcagtttttcatactttgttttgagtgagtgtcgctctgttgcccgtgctagagtgcaatggcatgattctcggctcactgcaacctccgcctcctgggtccaagcaattctcctgcttcaccctcccgagtagctgggattgcaggcacccaccaccatgtccagctaatttttttgtatttttagtagagatggggtttcgccatattggccaggctggtctctagaactcctgacctcgtgattcgcccacctcggcctcccaaagtgctggaattacatgtgtgagccaccaagcccggcccagtttttcatacttctttaagatagttttgacaggtatatgtgccttagcctatttgatgtcggcagataggacagaatatttttatgaatctgatttgagattagaccccccatcagaccaacttagaatacaaacagtgtttaagtggggggttaataggtattgtgtgatgatcaggactttgcaaattttgcattgatggctttgaaagtgttttctgcgtgatcaatttaggtggatccaaaactaatgactccaagaaacactgaatttgctcatgtttgtcatatacccaaatgaaccacagtgtttttgattacttcatccttgaaatttctactataattaagtacttcgttgtttttcacttatttctatttagcagcattttaactagttctttgcctctagctgtttttgttgttgtttttgagagtctcactcggttgctcaaactggagtgcagtggtaccatctcagctcaccgcaacctctgcctcccgggttcaagcgattctcctgcctcagtctcctgcatagctgggattacaggcatctgccaccacacccagctaatttttgtatttttagtagagacggtgtttcactgtgttagccaggctgatctcaaactcctgacctcgtgatccacccacctcggctcccaaactgctgggattacaggcgtgagccaccgtgcccgggtcacctctagctgttttaaactaacaatttcatcttctatatagtatacactacttttttaatcttcctaactttttttttcctatagtatacaatttaaatttctttctttgatgtcttgtggtcttgtcccaacattttctatgttgtttaatttttcttcaaatgaactagtcctaatccatttttctttctctttgcctttatttatgccatttcatcactccagttctcccccaactaatgcctgtacattttttttagtaaggcagaatttctcatgtgcactgtttcttgaccttaacagtctaatattaaccatccttccaatggaatgaacatatgatacctgtagctcataacctttttctctactttcgcacacctgaggtatataacgtttctatcattgtttctcatttattcatataggttaaccttttaaatgtattagcaatatgaaaaaaaagttaaatttaagaaacttcaaaacagtagcctaaacatcaggtcccaaggttcagatattaattttatgctgacaagttatatagttgactttttaaattcttcaaatagttatgtatgaaccagttacaatatatccttaagatttataaacattaaaagaataattatctcagttttccaatattgtaaaagcaattaacagatacactttttaaagaagtaatccatatgtttgttatggtattgtttataaagcattcaataataaaaggctgatgaaataacatgttcagtaggatactgtgcagctacttaaaatagcaagtgaatatttaatgagctaaaaagctgttcattattgaataagtaaaagattatcaaatagttgaatagattcaccagaataattcatatgctaaactgttttactggtttactctgggtgagagataaatcttataggggtgggaggaatcttcttgattataaataagcatgtatgatttctgtgatgggcaaactttgttttttgaaaaggagagagagaaatccttgaaaaataaaagtgattatttgaagcaaccttacatccatataatgatttacttttggaaacctataaaagggaatcctactgtgttgaggaactttagacatgataatgaattaactgtcatggaagaaaaatttcaaaatcagataagtttaaaatcagcttcagaggaacagcgtgctttaagttctcaaagtaatattgaaaaggaattcaagaattacttcttgagttcgtggttgagagatttcactgtcatttccccactcttcaagcccccccagacctcaaaaaaaggtaagtgtaagaaaagggatatttaaatctcttttaatttgaaactatattagtaaacaaactaaagaaatacaaatctggtttattttatagtgataaagatttgataatgcaatgaaacttccatatacaaaaattaagcatttttctgttaagtttaatttttcgtagcataaaagtactatatagacatagaaacctcaggaagagcaaaaaaaaattatttaaaaatcatttttatcatccaaaagcagttgttattagccttatatatacacccttctagttgcatatttggattagtgaatttatttctcaatccaattcgttactgtgccagggactagaaagattatatttcctctagagaagaggtttagtgctatgcttctggctcagaaatattttctttagatttgagttttatctaaaaattaccactaactttatatctattccatagtattgtaatgtaaaaatgcctaggattagaatttttcctcaagattgaggatacaggaagatgcatcttgtttactctggattcctcctctaccatatccgcatgtcatccccaaggataccttttcatagtgaaaacaatttgaggcaagggaggtcatgaagtattctgagcaggagagtaagaaaaataacttctgaaatacgtgtactggtcagaatttgcttaaagagagaaatctggccgtggtggctcacacctgtaatcccagcactttgggaggctgaggctggcgaatcaccagagttcaagagttcaagaccagcctgggcaacatggcgagaccccatctctactaaaaatacaaaaattagccgtgcatggtggtgcacgcctgtagtccctgctacgtggtggggggctgaggcaggagaattgcttgaacctgggaggtggaggttgcagtgggct

SEQ ID NO: 864 - DNA, 4967 bp, Homo Sapiens
tgtttcccggacttctcagataaaccctctgcaatctcttgggttcctttctccgttccttctttaagaacattctcaaagctttcgtctattggcatcggcttggtctccacatctgcttttgttatttcttggtcttcaatttcaatttctaaggattcctcaattggaagtgacacctccccatcctgacttgatgatttcttcatggagcagtggaaagaacgtagtccagaaattagaaggttttggtccatggcacagctgagcactgacaacacatccttccctgggcttattccatctgagagggagatgcacatgtatgatttcttctacggtcattctgaagatcggtgtcatcaataatttgggcttgggactatccagtttcacaggggcattcagttgattgaaaatccaatatcaatattgtttatagtatcaaaacaatctaccgatcaaagtctctaaaattactacaaaaacctatttgatatcctatggcattgcccaatttaaattatttataaaatatgcagtaaatgtgtatgccagaaaatcaatgtcctaggcattgactcctaattaattgtttgaaatattttcataatagtgaatgagcacagtgtttgcctgacctctacgaggaagaggaggaagtagaagcagaacaaaggaaaggaggaagaggaagagaaataagaaaggctgagagggttgaaagactttaaggggggctagtaagaaaattgtaggcctctagaattgtacacaggccagcctttccttctcatctacttcactttcctaaaaatcaattttaagctagacaaaaaatgtgcagagaccaactttaagtggatccaaggcagtaatttgagctgattccatcaaattatagatgcatgagaagcatgcattttctaaagaataacaacgctgcaacaaacatttttgaaggaactactaaaatatttccatctctaaactcatcctcttccacttcagatgatttcttttccatttcattctattctctgaagcaaaaaccagaggaaagaaatctgatggaatgaaattctgctagcaaccatctgaaagtataaatgagggagaaagtccaagatttaaaaattcaagcaaattttcttgcctgttggaaggaagagctctcaaataaagagataatcaagagacatattacagggcatcaagagccatgaaagtaaatcagcaaactggataatttcttgcagattagaaacatctccctgaatcacagttgaagcaaaggggatgatgccaggtctgactcctacttggaaaatcataatcccatgtttcctcttgcctgggcaactgtggagctgtgacatgcctgtgtgcagcccactgcacaatcagcagacctcaggcaaatccagctccaagctgcacctagcacctttaatgaagtgactgattaaataaaagcatcccccttttgttaagcaatactttctgaagcagcatggatttagaggcagccctgtgagtttgtaggcgataagcactatataaatactaggtaatagtgggattagagtcagggaaagacctgtgtcctgtgtatgaaatgagaaactggaaggagaaacttttaaagagaaaaatacaggaaaaggcagccctttatccttttcatttcctcttattcatatttctttctgctaaagcttatttctgatggtaaaatctcttttctcttgggtctcattatttcattctctttttaaaaaatattccctaattattgcaaccaagtaaattttttctaacaaacagaaggcccaagtgacagctcgtgattaaatatacacactaggaaacaaacagtagtttctttcaattgactgaactgcctctatacttaccatcttgcaaagatataatgaccagagacaaatgaaactttaataaggtttctcggccctttctgctatcctcaagtaagtatcaaaaccttccatgaaaattcagttccatttgaagaacaggaacaaggcctcatgcccctgcataactaaagctcttctttctgatttccttcaccagttgcttatgactttccttctcatttcttttcagatttctcaggcaagtacaactgagctgataaagaaacagcaagcccattgagtggttaacccatcagtcattatatatttgcaacatttagcattgaattgatatactaagttttcactgaaatctcttttatccatgcccacacaaacagtatagtgtcaaagggcctgttcttgttgatagtgttgggtaataactcctctccatcttcttcacgaagccctggtgaattctggacatcaagtagggtgaccatgaaatttatcatccaaacttggacacatagtgaaagaagtgttactaaaaattaggaaatgggggggaaaggggcagaattttgaactattccaggaaaactgagaagtatggtcgccctacgaattagtctccccacttctagtctgatatccctcaaaatctccctcctgttggaaatcagagtgatctattgttattaaacagatcatgtgactctcctgcttaaagccctccagtgattcccattatccatgggataagttccaacattccccaggcaacataaaatgtgttatattttctaatacctactatctcccagtgattgcaatttctcatgctacatttaaatgtctggcaacggaactgattgtagtggcccaaacactatcaactacttttaatctccaggcctctacaactgtatgagtcacatgatattggaactattcccttgtattatctctctctcagtagataaggatgacgtcctagtgatcttcatgcccccagtaacttgccagtgctgatgcttagtaaggacctaattaacattgatccaactggacacagacatggaacaattaggcattccatattctgtcctttccatattctgataaagctacagtaggttggttctaccctatataggaagcttgctacatttatagaaactcaatagttaccagaacaggaaaactgattcacagtgtcttgttaaaccaaacaccaattttggttactattccttgataaagattgatacaaaaccagcctgaccataaaaagtggcaatccccatgttgatgctggtggccctagagagagaaagtctgacacaagccagaggaagagtgttcatatcccaaagacttaggaagcagctggttgtatgaaaacctcacagcactacattacacatgttcttccctttctcttctctttctctctggttttgcctcccagtttgcttttagtatagttactcttttcattttcttttgggccatttttcttactactgtgtaaactttacctcatgcttattcctaatgtgcccagaaacacctcaatccttacagaggcatcagagctctagattttcaggatctctctcacctgttccttcccacagaaatgataataagggttcctgctcacatttcctcccccactccctctgcttcctaacctactctggtgcttccttgtgtagctctgcatggtgtggtgtaagagttattaacattattgaagatggggtcttgctgtgttgcctaggctggagtgcagtggtgcaatcatagtggtgcaatcactacagccttaaactcctgggcccaagccaacctcctgcctcagcctccttgatagctgggattacaggtgttagagattgggtcttgtatgttggccagtctggtatcaaactcctgacctcaagtgatcctcttgcctcagcctttcaagtcactaggattacagatgtgagccactgcacctgatcttgtgatggttaattttacctattaatttagccggactccaatgcccagattggtaaacattattctggatggatccctgaccaatgcatgtggtgtgtcccctcctcttgggaactgtgagtaacaatctatctttttgatggcaattgtctcttaatctgtaagtttcaccatacctgaataatttttaaaaacccacattttaaaatagccatgcagaacaatatacctactttcattaagaaagggccaactagtgaaggtttcaagcagtagaggagcatgttgagagtttttccataaagtttaatttagcaccattatgtagaatctaataaaaccgagatgaattttgcttattcctttttcccctttctgcttttcaatctcagttccctggttctatctgctaacttcctactgatcattcaaagcccatttcaaatgccaccttctctaggaggcattctctaatctcctcggtcaaaactaatatttctttcctctatgtttctattgtgctttatttatatcacaattatagtactcatcacaatatatcatggttaattgtatatatatatatctgtctctcttgctagactgcagtctttctgagagaaacagtttagtcttacccatcttggtaacctcaggacctagcatatcatttgccattatcaacaaaaactggactgagctatattctcatttagaggcaggacaagtatatagatgattgcaatagttccattaaaagattagttatcaagcccctgaactagagatgtagcagtaaggatgaaaaaggattatcaggtacatgagccactgttcaggtggcatctagagctgtgccatccaggacagcagccacttctcccatttggatgctgggcatttgaaaggtagctcatttgctgtaagtataaaatattcattgaatatcaaagacatagtataagaaaatacatcatacttaattaaaatttttcatattgattacaggtggaaatgatattttagatatacttgattaaataaaatatattaaagtcttaaaattta

SEQ ID NO: 865 - DNA, 4493 bp, Homo Sapiens
gcgctgtggaaccgcctcctgctagagcagcgggctggcgacggtcctcgccggggcgggaagcggctcaggctgccctcgctggcctgcggcggcgcggctggaagcgcgggccactcgtgcgtgggtcactcaggactgcgcctcgcgcgactgtgtgtgcaggaaacaagcaggaaataccctaaaagagaatgaagcgccatgttgagggtcgcggacgtcgcgagtgctgtgggaatgtgggctgaggtggagagttatggtagcccgtgttacaggctcaggggtctgaaagaagcctaatcgtggaggcggcatctgaggagggtcttgaaggctgggcaggcatttgcccgacagagatggaggaagctagtcctgtctgatggaggaaacagggcggaggcgtggagggagccgtgcagcgctggtgtgaggagcagcgagcaggccaggcctgtaaagcagagtgagggaaccaggatagagaaggcaagtcggggtcctgtggtcgctgaagaatttgaatgaaatcagtaaacaggtgagagggatccatcgcaagagcatgggatgaaaggaggagtagtccacggtgattcctctgcagcggtgggtgttattaatcgcgtatgtgacaccaaaaccaccccactcaagctgtggctctttccctaaagtagaaaaccgagaccagttgggttccaagcatccacgaagatcttattaaattcgtgatccctggtggcaccatggagtcaggattggctcatctcaaacctgactcagaaacaaaaccgtcacaatgtgcagagatgagcgtccttaccgctatcaacgtattttctggtgttttcacagtgctgcgcttcctaatccccattccatggcaatccacatgccatgatgcccggagtcattaacaaaggagacacacaggggctcctcacgttggctttccagggttttgatgaaaatctgtttcctcgtctcatacaatgtggttagtaatagtatcatttagggttgaagaattaaatggtacgagttatatagggtgcttattataacctacatggaaaatgcctaggatatgttagctatgctcatcaccaacatcgttatatgatggtaataatcagatagtcaggaagcctgacaccaagaaaatggatacatgctctgaaggaatgaatgtggagagatcagaaggtcaagaacaaagtcgtacaatatgtctacagtaaagggatagagaaaagaaaggctataaaagaaggaatgaaacagagttaaattatagaaatcaaagctaaggagaatttccagaaagggtagtatcatttaatatcatagaagtttaggagcccaagatggaaaaaaggcctctgggtaactgacattgaggcagtctttggggaagctccatttccgatagagaagtagactgaaagtcagcttgaagcagggactaggtgaagaagctgttggctggtcgcatggggaaataaataagggatggcatatgccgtatttctggatttctttctttcttgcccagcctctatatatgcacagagtttggcgaaaacttacaaaaaataaaaatgaaaccaatttcgtttgtagacccaaatacaatgctttctgttagaatcaagataaattcatgcctctcccttctattcaaaccgtcagttttgaaattaaacatcagcttttcttcttcattaaaatcattttcagctcttcccattgatggtttgggggagttgcataagcagtcaggtcttgatgagtagaggaggagggaacaaacactttcagcaaaggcagaattctgaaattctgctcatatttttttccagtaactttcctatgtttgtgaggttattcagtcataaagatcctagtgaaatgtttttcaagctttactaatcataatcactgtggacatttgtttaaaatgtgtattcccaggcctctcacctggtgattctgattcaggagatcatggatgggactcagcatacatgtgtttgacaagtatcacaagtggttcttatggtcaggcaaatttgggaaactaaccaggaatttatgtttttatgactggcagctagaaaagattcctagagtctttgctttttgaaaataaaatatttcttttttaaaaggaaaattgtatgactagatacagcatttatacatgtgataaatgtactatactgtgtgcttttgtcatatttacagttaaagatgtgtaagaacactctgagaaaaattgtatattaaatgaaaagaggggtaagtcagggtgggggagaaatgagaagggtgtgcttattgttgctaaaagttagaaaagccagaatgatagcatctaaggttgcaaatagcacactgtaagttgagggagcttcacaatcatgtctgaagccttctttgatatgctgagttgtaaacagtggctttggacaagatttgagggagaaaccaactatgctttaaagtgttcatttaaaagtctttaattaaaggaaagtctttgcatttacttgagctaatttaacttcaggactttaagaaattactagcccttaacctcttaaaaattgtctttcatttcaaatgaaagtttaaggtggcctttatgttcgattggtatacttgtgcgaagacttaacagcaaggtactgtacaattctaaatgtttacttcttaattttgctggaagaaatatactactcaattgattatttttaaagcaaagtaaaacaatttattttgacaagtgacactgtattttcctagttttttggtggcaaagattagtcttaacatcactaatcatcagagaaatgcaaatcaaaaccaaaacgagataccatcctacaccagtcagaatagctactattcaaaaattgaaaaacaacagatcttgggaggctgtggagaaaggggaacatttacacataattggtgcaaatgtaaattagttcagccactgttcaaagcggtttggaaatttctcaaagcatttaaaatagaattaccattcaagccaacaattccattactggtatataacccaaagagaatcagttattctaccaaaaagacatatgcacttgcatgttcatcgcagcactattcacaatagcaaagacatggagtcagcctaggtgcccatcgacagtggattggatcaataaaatgtggtacatctacacagtatgattaggccattcttgcattgctatgaagaaatacctgaggctgggtaatttataaggaaaagagatttaattggctcacatctctgcaggctgtacaggaagcatggtgatggcatctgcatggcgcctgtggaggccccagggagcttttactcatgatggaaggcacagagggagtaggcacatcacatggtccgaggaggagcaagagaaaatgggagtggggcatgcctcgggcggttcagctctgttgacactcatggtgctgcttgtgggctgatgcaggagtctactgtgaagggactcagtatggtggaaaaaaatattcaacttctgctcactttattcagtgtaagaactgtaaggaggactttctgcatataataccattatggcctgggggaggagtatcacagtcacagagtactggttcccttactgtccaagcatggttctactctttgcagtccaaaggggcttcatagactgactcatgtattcagggttcgttagctcttgtaaaggtaattttatatgtggatagttgttcatatagatgtgtccgtaggggtaagattactggagagatcgactccactaccttgctctgcccaaatccttcccctttccaacaagagtttgccacctcctagttttcttttttcttaaccaaactaagtttagccttttaatccttaactctcctccacttctaatgccattgcttctttgtatgcttattgtattttccatgctatatgactttcagctggttatttacagtatgtaagttttaatatcctgtaaaagggggataataatagcatccatttgatagggatgttaaagatattaaatgacactgtccatgttaaataactttttaagatatattgagatgtttctgtacttccttgttctggccttcttgttgaaccagagaaatctattgccatgaaaagcaataaaattgtgatagtagaaattaaaagtgagtaggaacttatttaaaaatcatcattctccttttcaatgcaaaaataagaactagaaacttttaataaggcaatagtctgaagaaataacttatggaagagaacatgggttttttaatcctaaagggttcttttatatattcaagggtcgagattgcctgccttgtatcctactaaaatttcaatgcaagtttcagagagggaggaaagagtcaaagaaaaaattgcactggaaaaagttaaataagtaaggaag

SEQ ID NO: 866 - DNA, 3503 bp, Homo Sapiens
ggggagcccagacttgccaatgggtaagtgagtctagtcaagatgtaggatttcagaaaactcactcagaagagcaggatgaagataaaggaggcatcattcagcagcaataaccaactcatttccttctctagaaagcaatgaaacaagaatctggtcatgggattttaccagtgcaaaggattaatccacccaattgatggccaagaaaccaaccagtgagagcaggaagcaagaacacctcgagacaggaggcatggctgggaggcctcaggaaacgtataatcatggcagaaggcaaaggggaagctgtatcttgtaataagttaaatatttgctgaaggaagagagctgtaatagaaaatggaagtgccagtggtgagactttatttttttttctgaggaatggttgaaatacatgaagatacatagagaagaaaacaattcttaataagtgctaagtgtcatcaaatactatgtttaaatgaactcctactgaagagagattagatttttttcatctattttgttaagaaaacaattgaagatcaacaagtagaagtaaggagtagactcttcagatacatggatttctaatagtagagttgctccagctggactcactcaaataaaatgagttccaaattcccagggatgtgcaaacattgaataaacaatgaactgccaagattaggtagtacaaagctcatagatgattcctgttcccatattgcataggtctcctttggattcagaaagacaatgaactgccaagattaggtagtacaaagctcatagatgattcctgttcccatattacataggtctcctttggattcagaaagacactgggcttcccccaaaccaaaggagaatagtgcccctcccactcacatccagaggcgtacatctactgcataggagttgctttcattttcctctttataaattgttttgtcttattctaaattcactaaagaatgatgattttcagaaatgtaacaatatcaggtggaagtatagttatgtagtagtatagcacaagttaagctaattaaaagatatcactgatatatatcaaaatagaaacacatgcaaaaatgacaatacttatttttgttggggatgcagagaaaatagtactctaaaaactcctagagtgaatatgcattgttatatctttaatttttaagccatgataaagagggtattaaaatttaatgtacatacactttttcatcaagcaatactttatatctagaaatgtatgttatagaaaccaaagggttactagtagagacctatgaataaataattttcttgcattagatattagaaaaatacccaaacatgataaagtagttattcaaattatggtacatctataccatggatgttcatgaatgcaaccattagatacaaccccgtcataaaaccatcagatctcatgagacttattcattatcaagagaacagcatgagaaaaacccatccccgtgattcagttacctcctaccaagtccctaccatgacacatggggattatgggagctacagttcaaaatgagattggactagggacacagccaaaccataacagacatcaaactatttatcttcacaaatgatataatttcacacctagaaaacctcatagtctctgcaaaaaggctcctaggcctaataacttcagcaaagtttcaaaatataaaatcaatgtacaaaaatcagtagcatttctatacaccaataacatccaagctgacagcaaaatcaaaaatgaaatcccattcactatagccacatacaaaaaatacctaggaatatggctcaccagggagatgaaacatctctagaataagaattataaaactctgctgaaagaaatcagagatggcataaagaaatggaaaaacattccatgctcttcgatagaaagaatcagtattttttaaatggccatactgcccaaagcaatttcacagattcaatgctatttctatcaaactaccaattacatttttcacagaattagaataaactatttcaaatgtcatatagaaccaaaaaaaagcttgaatagctaaagcaatcctaaggaaaaaaaaatgaaacaaagatgaaggcctcatgatacctaactttaaaatacattacagggctacagtaaccaaaacagcatagtactggtacaaaaacagacacatagactaatacaacaggttagagatcccagaaagaaagccataaacctacaaccatctgatctttgacaaaactgacaaaaacaagcaacaggtaaaagactccatattcaacaaatgatgctgggataactggctaatcatatgcagaagattgaaattagattctttcctttcaccatttataaaaatcaactcaagatagattaaagacctaaatggaaaacctcaaactgtaaaaactctaaaaggaaacctaggaaatatcaccttggacagaggccctgacaaagattttatgacaaagctttcaaaagcctttgcaacaaaaacaaaaattgacaaatgggacctaattaaactaaagagcttctgcacaacaacaaaaattgagtaaacagataatctacagaatgggagaaaatatttgcaaattttgcatcccacaaaggtctaatatgaagaatatataaagaacttcaacaaattaacaaacaaggagtgaacaaccctatccaaaaatgtgcaaagaagacgaacagacacttctcaaaggaagacatatgtggccaaaaaacatatgagaaaaaaatgcttatcatcacaaatatttagagaaatgcaagtcaaaaccacagtgagataccatctcataccagtcagaatggctattactgaaaagtcaaaaataacattctggtgaggtcctgaagaaaagggaaaactgatacactgctagtaggaatgtacattaatttagccacagtgtaaagaagtttggagatctttcaaagaacttcctcaaagaacacacatatattcattgcgacactattcacagtagcaaagacagcaaagacatgggatcaaccttgatgctgatcaatggtggactggataaggaaaatgtggtacttatacaccatgcaatactatgcagccataaaaaaagaacaaaagcatgtcctttgcagggacatggatagagccagaggccattatcctaagtcaattaacacaggaacagaaaaccaaatactgcatgttctcactgctaagcaggagttaaacattgagaacacttggacaaaaagaaaggaacagtagacgtcgggcctactggagggtggagggtaggaggagagtgagaactgaaaaactacctatctgatactatgttcattacctgggtgatgaaataatctgtacacaaaactcccatgacaggcagtttacccatgtagcaaacctgcatatgtactccttgaacctaaaataaaaattgaaaaaaaaaagcca

SEQ ID NO: 867 - DNA, 1436 bp, Homo Sapiens
gtcccatcgagaagcctcgggtgaggggcccggtgggcgcccggaggccgctggagggctgtgggagggacggtggctccccactcccgtggcgaagggcaggcaaaccagaagcctcttttgagagccgtttgggattgagacgacttcccagagaccgtgacaaaagacatcattctacgctgcacaaaagcagccagaggcggcctctcccacgctccgggagcgaagggaatgatctggctagagagcagcactccagggtgactccgtcctgctgtctaaccggcctccggcagagtggcagatcatctgactctctgaaccactctgaacatcagtctcttcatctctaaatgagggtgctggccgtgtggatccgcaggggtatcctgaggtttgccacgtacaaaaagcttaggacagtaaatactaataggctggtgcaaaataaattgcgtttttgtcactaaaaaaaagtagcaaaacccgcaattattttccaccaacctaatattaaatgtgagtgactgggtcaacttgatgcagctttctgatccctgctcaacctgcgaccagcttctagaaggacaggagtggcctgtggccgtgggtcttaagggcaagagaacaacagagagatgtttctggcccctcttgtgtgaaatgaagactttttaatgtgaatgtagaagtaagtcttgggagcaaaaacaaaatcagaccctggagaatggcagaaactccaaaggagttgaatgctggagaaccccaggcgaagttaaatcaactcgacagaagagcacagacatgtgatggggcaccaggtgggggtgacaggacggcacaagctgccttctggggtgatggaatgctctgtagcttgctcaggatgtggggtactcacaaacgagcactggtcagaactcattgaatggtagcacttgagatctgaccagttcaatacatgctcactagacctcactctaaaaaaggaaaaggagaaaaaaaaaaagagttagaaactaagggctagaggaaatatgtgacagacaaggaaaggcttctgtaagcagaatgtgtcttttccatggggaaatatgaacgatatgtctatacacatgtgcacatatgaacatgaatctgtgaatgtgcacacacatgcatacacatgtacatgcacacatacgcacaaatgcatgtgtgtacacccgcgtgggagcgtatacacatgtacatgagcacgtatgcacaaatgcatgtgtgtacacccacgtaggagcatatacataagtacatacacatgtacacacaaatgcatgtgtgtgcacccgcatgagagtgtatacatatgtacatgcacaaatgcatgtgtgtacacccgtgtgggagtatatacagatgtacatgcacaaatgcatgtgtgtacacccgca

SEQ ID NO: 868 - DNA, 2779 bp, Homo Sapiens
agaaatcctccagccctgttagaaatgcctcagccagggggactcatctcctcaaacctgggggaccgagacctatgagaggtcacagcatgagccaggacatcggaggtacccagacattgttatgaaactccgcatgtgcccctggtggacgctgctggacccagcatgcacacttctcggctaagagtcaccctggatgaaccaccattgccagcggggagcatgttgcagctttcccacgcagtggatgagaacgaaggttacgaccattgtgtgggaggcgtctgtgtagcaattgctggaatcacttgtggcattgtagaaagactgagcgtgggaaagaagacgcattctgaagtcaccccgatttatgttaaattatcaccttgactactgctatagaacgaatgtttatgtcccccacccaaattcgtatgctaagacctaatagccaataagatagtattaatagatggggcctttgggaggtgagtggctcatgagggcagagtcctcaaaaccagataagtgcccgaataaaaggggccccagagagatcccttgcaccgtctaccatgtgaagtgtagaacacagcgagaaggccacctatgagccagaacgtgggccctcaccagaacccagttgtgctggcaccctgatcctggacttccagcctccaaaatgacgacaaagaagtttgtttttcctgagccatccacttcaaagtattctgtcatagctccccaaatagactaagacatctacttaaccttggtcaaacgtttaaccttggagtccacgcctctgaaatggtgacaataacactgtgtatttcctactttatgatcaggattaataaatgtaatttattaatcagaaattagtaatttctgattattaattctatggtgcttgatacttgattgaggcttatttaatatttggatctcttttaatttttttcttttttgctctttctttctgcttttcctcttccccttttcctattgaaatagaatgcagaggataaagcaagcaaacaaaaaaacttccagaagaatcacagagttttagacctagaaaaaaactgaaaaatcatccattccactctcctcattttacagatgagggcatcgagcctcagagaaatgaaacttgcccaagaccacacagcaaagagacgtattttaaagaattggctcgtgggattgtggggcctggaaatctgaaatctgcagagaaagccagcaggctggaaattcaggaagtggcgaggaaagaagaatgaagacaaagaatatggagtttccattgatttagccaagtccataacagaagaaaagtgccttccttcggaacttccaatacaatgtgtgagaatggacctgttacaacttgtattactcgcagggttcccccactaccaagaataggggtggccttagaaggcactctgaagcaagaatcagcaagtgactgaatctatgagactcgtattgatcagcctcaaaagaaatgagtcctaccttctcggtctcttaagaaattcattctcttgaaaagcaattcaaaaagagctttccctaatacacattagataaacaatgagatatcctcctagctttctcttgggaaactttcactttatatcttttcaatttattctcatctttttttttgttccttccttccctacttttaggctttgtcgttcaaaagctagctcgtagaatttttttaaatctttgtattcatatatccctaactagagcatgatctttttctggctggtggatcctccccagaatgtttgcatgtattagggctccagtgaataggtgttggtcatgaggaaggatgaccagctaagggagctaatggcttagacagacactgtagaattgcaaggaatagagatgtgctcaagataccttggttggcgaggtttattgttgcagaaacacactgggtggtagccagtcaaccaagacggcggccatcaattccttacctttctttgtgtacatgctgcaccccatgaccaaaggtagggccttttttctcctcccttgtatttcgactggcctcataccttgctttcaacagtgaaatgtaacagtggtgaagttggacttgttccaagcctagactttaagccttctgtttcctacttcttagaagccagtcaccatgcaagaagcctgcctacccagtaaccagctgtgagaagtccaagctggctacacaaagggggggacactgaggtgccagacaggtgggtaaggcctgcctgaaccttccagctctgcccaacactcagctgaatgcagtgaatcagccagcccagctgagaacacagtgagcagaggttctgatcctgcctggattccagacccacagaatccagagaaatcatgtgactttaagccactaacttttgcaatagattaatgtacaacaatagataaaacacacagaaaagtcaagaaaatgtttttgaagaaaagtgatctccgtaggttaactgcagttggttaatactaatttattgtatatttcaaaatagctagaagataataattagaatgttcctagcataaagaaaagacaatttaaggtgatggatatgccaattacactgatttgatctttacacattatatgaatgtattcaattatcacatgtaccctgaaaatatgtacatctattatgtgtaataaaaataaatcaaaactttttaaagaataaaaagcggtcgcacatctaaacagggc

SEQ ID NO: 869 - DNA, 7970 bp, Homo Sapiens
ttttgcaactacaaagggcccagagtttcccttgtgaatgagctcagcatcctcacgtttccaagaggaatcaacactgcaattcctcggaccacggtggctctcttcccagcacacctttgctgtgacctgcacccctgcattgtcctcaaagacacactaagaaaacacatttcagaaggaaggacgtaacggagctcatgatcctatgctccccagttggactccatgggatactgtttcatatcttgttctaataggctcttcttttccagagttttttattttccctggcattttgtgttttggtaattgcctacaagaatagttctataacagaaatcaacaatgaaaaccaaattacccctgcccacatcctttcattcctttttcatctctaatgatattttctgtatgatgactaacccagactgacgtaatttatcaattgatcttgacgatgtacattagaaaatgcattctgcaggccccagcaggccatcttccatgtgcgccacgtagctttagaaaacctattagtgcaacagaaatatctaaagcccagcctttttgctaagaatattagaactggtgctaattactttattaatcataaagtgaaacagccgtgctatgtcaccacagccgtaaaataagtggttttatggcaaaagtagttaaagagaaaggacagattggatttatatcatgtttatctaccatttattaagtatcttaatcatatctcctccacagagaagcaaacatccccctattcaaggttaaaagaagcgtttgtctttgaagccccactagagcagttatctctagtgaactagggtttttaatggcctttcacaataattacaaatttaattaacctctctgctttgatcagtcacggctgtttctcattaccttccccaatgcctgtttctgagtcaagagctattcctgggccttccctttccagctataaagtactgtttaggtttaatttagtctggcacagctgtaaagaaagcaactctcctgctcaacagcctccaatgactccccgttgaccactgaattaagtacaaactccttagcccggcatttgggccttccacagtctggccccagacccccttctaatctcatcccaactcttttttaagcaatcctatctttccttaccatctttcaaatttattaaattcttacatacatcaagacttacttctaacttgtctattctcttcagttgaactgtcagtttcagtgccagtcccatgctgttttacatattataactttataatatattttaatgcctgatgaggctaatgctagtatctcctcattacttttattttgccaaaatatttgtcagtatacttacccatttatttttttcagatgaacttcagatctcctttgttacatttcaaaagaatatctcttgatatcttagttatgattggggaagaactggcatcttcctttgtacaaacccctggactatatgaatgaaatgaagatgagtaatctgccaggaagatttggagatcaaatcctagacttctaactcttggaagtctatgtgacaaggaaggtaaacaaatggaaaactttagtaggaatatttttctcctcactctttttcttacatgtcactgatctctaagacttcatgacttgccttttcttgatgcttcccgcacagctgttttctttttcctcaccaccagcccccgagcacgcacagtggaggaatgagagaagcttacataaaaataactttctggaggctgaagtccaaggtcaaggtcaaagagccacatctggtgagggccttcctgctggtggggactctgcagaaccctgaagcattgcagggcatcacatggtgggggagcttgagcacaccaaactggcttttactagagacccactctcatgataactaacccactcctgtgataacccattaattaattaacccttaatagattaatccattgaatgggaagatgtgcctacttcccctttgccttccaccgtgactgtacatttcctgaggactccctagccatgctttctgtacagcctgctgaactgcaaggacctggaaatcagacacacctgggttcctggtgagcttcactgcttcctggtctctgatatcagctctgcccaaatttcagctgtcacagaatgagtgatcctcatagtataatggaaatgcatcatctcagtttccccatggcctgaatgtccatacaaaatgagagccagtagagaaaaacagaggacgtgaggagtttttaaaaattgaggaaaagtggaaggaaaagtaaggatgaaggtgaagatgaaggaatatgtcagagatgctagcactggcatcccccaccacacagtaccatgtactgctaaagaactctagaacatacagggtgtagacggcagtcttcttggggaaaaagaggcttcaggattgcaagatttcagctactgtctctcctcggagcaggattccatcttttccatggctggggcccttgacacatgtcactgtgcactgctcttctcgctggggaaaaggaaactgaggcccagagagggcaagtgaatttcccaagagtgtccagatgatacggagctgagctggaaagtgagcctggatctctctggttctgaaagctttgctcgaaagcacaggatgacacctccattgacttgaatcttgctttctgacatgctggctgtggcttgcttgggacctgaataagagcttgcttactcccggtgttcaccacagcggaaccatgggtgcagaaatgtaattctctgcactatctttctggaattgggaggggcacagaagcaggaaaagtgaattccaggaaagttgttgcatgttggaagctgtgttgtggggaagtgacaagttgcttgctatctgaatggggatgggatcctttgtgaaggcagcatgaatcaccaacaggtaggattagatggatgatggttgtatttggaattgtagccacacccttgggactgcagccctgtgaagactgaggttctgacgaaagtcaagaaaaatctgcattgcaactcttcgaagagaagaatgtgacatcttgagtgggtgaattttactttcttcttgatagtgttttaaaatttttagaaatgttttgcaatgtcttaaaagtgaccttctacccagaatttggttaatgttcagttttatttccttcttatttttctgagtatttactttttcaattcagctgaaacttttcaagaataccatgacctttctctccttttaaaaaaaaagtttcaaacagacaatgttaaaacagaagaagttttggaaatcaactacttaatctattatgatatggaaactgtaaactaaaactgttcatatccactccccaagattacatcaagagtggcagggctgggacaccagagtttccggaatggctcctcagggctccagctgcaacaaactcgctgtgccaatgtgcatgcagttcctgattctaatcaaataagtatcataaccgagttcacccgaaatagagtatactgcacagaaacttaataatgggtgagaaagacacattcgtgacattagcaattattaccatacgtggtcaaatccatttttattttctgttttctcattttgtgagtcctctgggatctacacacaggtaccaattttttgcctattcctggcaccgcgcactgcttaatcatcctccccacactgactttgttgaccatgctcgattgtcaataccaatagttctccaggggtggctcagatacccacaggggtccctgagatcctttaaggggtctgcgagatcaaaacaattttcataatatgtcgttttccagaggcagctgcataaatcacaggagactgaatacaggagaagatgtaagaatccagtcagcttctatcaaaccagacataaaagacatttgcagatatgtaaaacaatgccactcttcacattgcatttttaaaaaatattatttcccagaaaatatatcatctatgttaatatggaatggggtttgttagaaacctctttaaatttcaagtaattaacaatttaaaaggcagatatctagagctataggagtacaattaatgaggactcagtcttcaaagtccaaagcgagagcagatggagaaacagttctcagcatttggtgttctgcgagccctcatgggaggaagaatttgttccagcataaagagacgtaagaacgagtactaggaggcaaaggagacagcattgataaaccaagataaagacatctaaatagggctgagcatggagactcatgctcgtaatgctagtgctttgggatgccaaggcaggagaatcacttgaggctgggagtttgagactgacctgggcaacatagtgagacgctgtctctacaaaaaataaatataattagccagggatgatggtatgttgcagaagtggaatttattcataatttatgcaacaaatactcatgatgttcaaggttctggtgtgcaacagtaaacttacattccctcactttaggttagtgagaatgaaagataataaaaaacaaaaaatatatataattcaagtggatgtaagtgttgtgaagaaaatacaccagtgatcataatagaaatgcaatctattctcggcttgtcattatattttaatctttttatggccttttgttctgatattggtacataaaagtttaaatcctaatgtattaaaaaagtttaatatcactataatttcagaactttatatcatgcttatcataccatcccatagtatgggggactacaggtgtgcaccatcatggccagctaactttgtactgtctgtagagacggaattttgctatgttacccaggctggtctcaaacccgagggctcaagcaatcctcctgcctcagcctcccaaagtcctgggattaaaggcatgagtcaccatgcccagccagtggttgaaactcttattatggccattctgcggatgagaagactgagtcatcaggaggcagggcttgccaaggtcactgtgttggggaaacacagtcaggatatgaactcaggctcttggggtccctgctggtcactgtcaccccgtggcccttctgaagaatgtcacaggaaagcaaagctgagagggcctcgtgaactcatccatgcctgtctcccacactgacctgcacctttggtcccagaggtgcttatgaaagacagatgctcagatccctccttagagagtcagattcaggaggtctgatgtgaatcccagagacctggaattttactgatggcccagataatttttatggtcagatactgacctaattccacccagtttcccactaaattttgtaagtgaggaaagcaatgcagaagagttacaggaaggcccagtgttacatgcccaggtcatggcccagggccaagccagccccaaaggtgggaccctggttctcttagccttccctgacacctgtcaccctggctgctgctccagggaaccctctctcgggagaagcttgagcaaatgttgatcttcccagaacaggggtctacagaatccagaggtgtggaaacagtgggatgctaatagctgttagaattttggttcatccatagatccaaactttgaagcattgagacaaaagatagctgtgctttgatagagaaaatagataagaaaagggtgtgaaatctgagtgtcacagaagaaaaaggaagagatgacaaaagaacccggcagttcctaggagcccagccccgggcaagctctttctccatgtgttatttcatttaatcctgaaaacaacgttattaattcctatcattggtgctttacagatgagaaaaccacagctttgactgattaaatcatagcctttcttaacaccatgaattatactttgggaaatagtactccagagaagttcttctcaaccaaagagtcaggatccaggggaatagggggctaagcgtggactggaggaatgaagacacttggcttccagctttttgtatgtcagtctccttggtccacaccacagagctcctttggacatcattatatccgcaagatgtaatcattacatcttctcaggccaagcaaggtacaaagtgccaaaatcttaaaagagggggcattggatagaaaatattggacaacctcttttcctaagagaagaagatctttagaagaaaataaagctatttatacctctgtttctaaatacaaccatttttatacctgccctggagttggttcccagaagaggatacccattccatggctttctttgaattggcatttctaacttcaaactagaggaattagtcaaagttctttaacacactaaaccacccataggaatggaactcaccaatataggggacaggcaagcgggtttctgggttctttagtcattgacaagggttaacagcttaaaggttattggggtttctggctacacgctaagagtcctgcttcctaatgtaagctcccctcccccacattctttaaacacattacttcctcaagcacttcctctggcttaggggcggggttggggggagaaggatgcaaatttatctaatctctaaaaaaaacctctggtatttgtgcagtgagtttcaggctgaagagaagagagagacctgcggctgtttccgcccactcgtcccagcacagccaccagagaacgccgcgtggtttgttgtttggaccctcccagagcctcttccagatgctgttggaaaaaaagaaaagaaaagctgggcagccagtgtcacagcccagatgccatctcggtctatccgcggaaatgcaagcacgcagcgccaagcccaacccagtaggtgccaggccctgggtgcaggcttcagcttcacgccacatcctctctctcttttcagtctctgagtgacttgactcagccagggagaggagatacctacacatccgcatgaaggcgcgtgggaggaagccgagaaatgacggatggcgcagggcctactgcagccgcacgtagactagctccttctttacgggcaaaaccccctacttgtctgcagtgggaaaggagtccgttcagggcaagctctgatcgctgagctatggatgaagaagtgggcagagcaggttccttcctcaccagcgtcacctgcttttctcttccaagttcaaactcggcttaggtccccgcctagggaaaaggacatcagattccaggactggcctgctgtaccaggcggagagcacgagaaaccttcctgctgtatggtgttttggcatagatattctggatgtgacttgagactgcttgctgtttccggaccatttacacccattgttgtcttgtgagcccagtcacggcctgacacggaacgcctctcatgtaatcttctcataggaatctaactaatgcagagtgctgtggcattgtcagccctcatcttacacactgctcaggatgcaaaggtggctagtatagtaacatctgcctctttagcaagagcctcagttgctccaatttaaatacggggagggagctgggtgcagtggcttatgcctgtaatcccagcgttttgggagccaaggcaggaagatcgcttgagccaaggagttcaagaccagcctgggcaaattagcaagacctcctctctacgaaatttttttagaaaacttagacaggaggccaggcccagtggctcatgcctgtaatctcagcactttgggaggccaagggggacggatcacttgaggtcaggagttcgagatcagcctagccatgatggtgaaaccccttctctaccaaaaaaatacaattacaggcacgtggtggcgcatgcctgtaatcccagctactcaggaggctggggtgggagtatcacttgaacctggga

SEQ ID NO: 870 - DNA, 12880 bp, Homo Sapiens
agtcgcgcctgccacatctacctccccagccatcctactctctatgctgctgcaaactagacattccttcctggagggacctctcgcttcccatcttcagatcaggacgcacggtctcttctccgcagctgcttcctctggtgttcctgtgctcctgtcggcccgctgctcccacacacatgcccattcttctcgggctggcttgtatctcagggttacgctccccaggtcccttgctccaggaggatggcaccgggtcagagtgttcagacttgttgacgtccctccccccactcaattcgtcactgagccagaagactgagccttgggaatgtctctgagcccaccccacctctcctctctggcagcagccttgggcgagtcctgccctggtcaaccccagcagcctcccaccaaggccagcccagcagcccaccctcccacggctgctcaagcccaccaggccatgctttagacgaggctctgtaactttgcaaatcaagcatgcaccgtaggaccagcctttccactctgctcccaagctgccttccagccctgtgccatcctctacacacccctccccccgctgtacaccccacaccccattaccaggctaccagtcacttcccaaacacaccctgcacactggtctgctcgctgtctgctttgccttgtcagtttttgtaccacctatatctatgcagccagtcccctggattaaattccctctgtttgcaatactagtgggcttcctgttgtgctggacccctggtgatatatttccttctaggaggatggcagcaggtcctctgcctgctcgttcatgctgttccctctgcctgaactgcctccccctcttttttttttctgagatgaagtctccctctgttgcccaggttggagtgcagtggcttgatctcagctccctgcaacctctgcatcccaggttcaagcaattctcttgcctcagcctctgagtaactgggattacaggtgcccaccactatgctcaactaatttttgtatttttagtagagatggggtttcaccatgttggcccagctggtttcaaactcctgacctcaattgatccgcccacctcagcctcccaaggtgctgggattacaggtgtgagccaccatgcccagttggccctctcttttttactagtaaaaagtctattgattcttttgattctttaagacctacagcaattgctgcgtcctctaggatgaaacacatcactacccattctgctttccttggccgtctgtccctgcctctgtgagggcccttctcacaggcgatgtgaatgtctccaggactgggaccctgtctcagccctcgtgtacccagattcctagcaccgaggccagccctcacacaggaactcaggaaatgttgactggagtggaaagtgcaccttgaaatcacctcacccccgaccccagtcccttggagacggggcgtgctcccaggctccttttctgtttgaacagccaaccagagaatgaggggcctcccctgtcctaaccccagggctgtgcatttctgtgacattctcaatgatcctggttaatgtttaattccagtttctttgttttctgtaaagttgataacagagtggtgtagcagagaatgtaaaagaccaagacccacagcaggaaaacaaatacgcaccccgtttttacttaataattaaaagttagtcatttcccagagctttttgggaatgaatggaaatgaattcagaatgttaaaatccagccctgcaaaatgctataaccatataaagagcattcatgatgcttgcatcacaggccccagggctggttttgcacaccagccatgtgctggcctctacaaagattctgtcttcctgaaacttccatcagtgtctgactcctgcatcacaacacagatggcttttctgcgggatcctggataaagcctgagctcatcaaccttaacttcaacaccctccctcctggcccttttcaaccttttcaaccttggctgtctccgtgggaaccctcttttccagccagacatcctgtttacagatctcagatgggccatggggcgggtctcactcctgccctctttgaggacagggtaaaggagtggttaggagtatgaggtccaaattcgggcaggccagggttcatgtccaagctccatcatatctaggctgggatagccacaccacctccaggaagcctgctctggttttcctgacccatggccatgcatttctccagtgtctgcctgctccaagtgtcatcactgcctccgtggcattgaaacctcgtcagtcttgtgatatctatttctctgtcccttattcatgtgtttgtctagtttctccatctggactctaaatgctgtgcccacaacaggctattatgggtctctgtgtgtcccagactgcccgcatgaataatggctgatatggcttggatttttgtcctctccaaatctcatgttgcaatgtgattcccagtgttggaagtggggcctgctgggaggtgagtggatcatgggggaagatcccttaagagtaggttagcaccatcctcttggtgatatgagttcttgctcagttagttcatgtgagatctcgttgtttaagcatctgggacctcccctttctctctctcttgctcccactctcaccatgtgatgtgcctgctcccctttcttcttccaccatgagtggaagcttcctgaggtctttagcagaaccagatgctggcaccatgcttcttttacagcctgcagaattgtgacccaattaaacctcttttctttataaatttcccagtctcaggcatttttaatagcaatgcacaaacggactaacacagaaaattggtatagtgaatagagtatcgccataaaaatacctaaagatgtggaactgagtaacgggcagagggtggaagagactggagagctcagaagaagacaggaagatgagggaacgtctggaacatctatggttgtgacaaaaatgctgatagagatatggacagtgaagtccaagctgacaaagtctcagatggaaatgagaaagttattgggagctgaagcaaagatcacctgtgttattccctagcaaagagcctggatggattgtgttcatgtcctaggggtttgtggaaggttgaacttatttggtggcagctggcagaagaaatttctaagtatcaagaagtgacgtggctgcttctaacagcctacgatcagatatgggtgtaaagaaatgacttaaagttggaacttatacatgaaaggaagcagggcataaaagttcgtagcctagccatgcagcagggaaagaagaagcattttcaggagcggaatccaagcagccagtgtagcaatcatttgctagagacattagcatgactaaaagggagccaaatgctaatatccaatacaatggggaaaagttctcaaaggcatttcagaggtcttggagatagctcttcccatctcatgctcaggggcctaggaggaaagaatgggttcaggggccaggtatggggcactgttgtccagttcagcctcaggacactgcttgccacatctctgctggctcaaaagaccccaggcccaggtacagctccagttgctgctttggagaacgcaagctgccataagccttggcagtttccacttggtgttaagcctgcaggcacacagaatgtaagtgtgaaggaggcttggcaacttccacctaaatttcagaggatgaatcagcaagcctaaggtggctgcccaggcagaagcctgctgcaggggtggagcccccaccagagaaactctactagggcagtgtggaggggaaatgggggttggatcccccacacagaccccccaccaggacactgcctagtggagctgtgggaaggtggctgatgtcctccagaccccagaatgatagagccactgacagcttgcatactgagcatggaaaagccacaggcactcaactccaacccatgagagcagccacagggctagacccagaaaagccacaggggcagtgctgctcaaggccttgggggcccatcccttgaaccagtgcacccaggatgcaggacatgggatcaaggatcattttggagctttaaggtttaatgactgccccaatgggtttcagacttgggtgggtctggtagccccttcctttgggtcaatttctcccttttagaatgggaatatctacccaatgcctgtgccaccattgtatcttggaagtaaataacttgttttgattttacaggcatataggtggaaggaacatgccttgggtctcagatgagacttggacttttggattaattctggaacaagttaagacttagggggactattgcaaaggcatgattgtattttgaaatgtgaaaaagacatgatatttgggtcctgggcggggaataacgtggtttggatatttgtccccttcgattatcatgttgaaaggtgattcccattttgggggtggggcctggtaggaggtgagtggatcatgggggaaggcccctcgtgaatggttaagcacaccccttggtgataagtgagttcttggtcagttagttcatgtgagatctggttgtttaaaagagtctgggacctcccccaaccccttgctcctactcttgccatgtgatgtgcctgctccccttttgccttccacctttcaccatgagtggaagcttcccaaggttcttaccaggaccagatgctgacgccatgcttcttgaacagtctgcagaattgtgagccaattaaaccttgtttccttataaattaccagcctcaggcatttccttatagcaatgcacaaatatactaacacaatggccatagacagcgcttaccattagctcatttaacttgtctacgagggcagcacaacttggggtccacatactcatgcccaacttcattggccattcaactccagccaagtaacaggacgaaaagacagaaacccaccataagctgcggctgaaggtggccatccagcccactgttgggacagaatgcttagtgtgtacagatttgcttcggtgtccctaagataggcttctgacctgtctattttccctgagaattcagaataatcatgaacaagatgggagtatgaatctcagcatggaggcccagtggctgacacctagctttcaaacctaaacatcttgcacaggtttccttgtaccatgttctctgatgcgatgtcctgtgtctctgctcactgcttcagtgccctcccaagcagccgggatggagcccgggccgccacagcccccctggagtgcgtgccgcctgataggtggatcaagagcagaactcacatgctgcctcctggggaggaagggggttgtttatgaccatatgagctttgaggtacccaggatgacaggccaccctagaacccagggagcttgggcaagttcatccccttctctgggcctcagtttccctcatctgtcctgcaaaagaattggatcagataatctgggacattctatccagctctctgatccagagatcaggtttggggccgggtgggggatgtgaagtggtcttccaagctgtcaacatagcctgattgtgtaaggcctgcacaaatggtgtttagagcaatactttcaaaccttaatgttgggtgaatcacctgcgtctagagaaaatgaagattctagcaggagagagtggaagagtggttaccagaggctgggagcagggttggatggggaaagattggtcaacaagtacaaagttgcagcgaggaggaagttcttgtgttctatggcacagcaaggtgactgtggttaacagtaccgtattgtacattgcaaagtaggtagaaaagatttacaatttctttagcaaagatgagatgatggataggctaaataccttgatttgatttttacacaatgcatacatgtatcaaaacatcacattgtaccccagaaatacgtacaattatgggtcaataaaaagcaaaataaaatatgtagattctctctcaatggttctgaggcggggtctctaaacctgcatttctaacaagctccctggtgatcccgcggtgccggctgagtcggtgccttgattaggagggtttggcactaggtctccaggtgtgatcccggagcggcagcatcggcatcacctgggaaccttgtaagagcgagtagggccaagctacagaagtattgggtcagaaactctggggtagcgcccagcaatatgtgatgtaacaagccctccaggcgactcccatgagctcaattctgagaaccactgctttaagacaacagcttctaaactgggcggtgcataggaagcaccgagagagtttttaaaaatactggggcctggggcccgcttgtcggggttctaatgtaatcggaataggtgcctcccgggcatcgggatttttacagtctccccaagtgattctaatgtgaagtcaatgagccttagggcggacagaagatgagggctgcggggctcccaggctgcgagcctgcgattcttctgacggcgctttccggacgacggccactagggcgcgctgtggcaccgctgggaggccggctgcggttcagcctcctctcgccagcggctggaggagctccgggctgggaggcggcgcgaagccccgggggtcggagcctccgggagcggcttctggcccaggccggcccgcccccgtgcatcggcacctaattaatgctggccgcggcctcgccgcgcttgacgtcagtgatgtgctccgtgctggggagacgcggcctttgcagccgctcggcacaggttgcttcaccctggccagccctgctgcccgccccctccaggcagaacgccgggctcacctctgggaccgagcccttgctcatgctgctctgatgacactcacgcgagagtttctcccccatttccacccggcaggacaccagtttccttttccatcttccctggctgttctctgcccctcccctgccttttcagaacacggagggtcccggaaaatcccacaggcctggggctttgccaagtcagccgcaagaaccacctctcacctttccctttctgggtctctcctctgctcagttcctttcctgttcctgctcctcctttttctctcatctgagccgtgtggatcagatacttcctgcctatgcgttctcatgcacagaagtggaagagatgggatggtgaaggggggattgccttctttagcagcacagataggactgcgtttgtaaggagcgttttgtatgttgggggtgacgaggttgctgatgaaactctagtgttctgtcccccacagccacattactccctttaagcagcgatgggagttgattctggagaggagaactcagccgagtagagcaacgctgtcttgtctagctgccccagctggctggaagggtcttccatggctggaggagtttccccaaccaggacgccagaactgtctttttttttttttttttttttttgagacagggtcttgctctgtcacccaggctggaagtgcagtggcgtgaccgcagctcactgcatccttgacctcccaggctcaagcgattgtcccacctcagcctcctgagaggctggaattacaggcatgcgccaccacgcccagctaatttttttttattttttgtagagacggagtcccactgtgtagcccaggctggtctcaagcaatcctcctgctttggcttcccaaaatgctgggattacaggtgtgaaccaccccgtgcctggcccagagctgtctttatcataaatgttccacgccatatttcatctctgcccatccccttatccccattcccaaacctccaatctgatatttgtgtgagatttcatttggaggaaggccatgtacataatggtttggatgatgcctgatagcctccctggctttgccagcccataattctaagatgggaagagatgttgctggggagaagaggcggaggcttctcttctgattcctgcctggagccctgactgcaagggttgctcctggcttcccccatttgaaccccacccctggctggccagtgaggggagcattccctacagccccagggagggagaggctgccagcggccagacagggcattgggcagatggcacagagccagcccagccaggtggggaaattgagacccagagagggtaagggacttgctcaaggtcacacaaccagaccctggcagatccctttccacgctaattcctcagaagctcctgctggggtctctagtgggatactttggacagccctgtgggagtggcggctgggttccaccgggagtggggttactttgaagaacagtagtctctccttgaatccagatgagcagatacggttccagggctcagcctgaccctgaggctgtcacagctggggcaggggctgagggtggaaactgcctctaagagctcagagggcgtttagcctgccaggcacagagcctccaccggggacagaaagccaggaaaaaggtgtgggacgtcagtacgaatcctgctccttccatcgtagactctgaaagtaaaggtccaagctttgaattggatctcagctggggctgggggctggccaagaagattggggtggccacacatttgggcaagtttccctactgcctccgcaatgcgcctggccagggcccaactggaaatcagagacccatgaaacatcagctcagggagcatcagggatgcatgctcgtgcttcaagaggaagaaaccccgagaggaggctgggagagagactggtccaaggtcactggacagtgagtggtggagctggagcttggacgtgggctctggactctggattgtgtgtccccgccactgtcctgacatccatgtggacagatgccctgatccccctctgcaggggctgttctcttttcctctctttggggtgtataatgtgtttgtctttgtgtgtgtgtgtgtgtgtgtgtgtgtgtgtgtgtgtgtacattttttattttgtctctttacctccaaatcctatctgcttcataaaactcagagaaaaagtctataagctcagtcacccattccaggatcgctgtcaggaaatcctcgttcccatctcacccgcatcccccacgctggagcttaagtccttccaggtggggctggcaagagtctgcgggacttactccaagagccccggggaagcgggctgggctgtttggggaggaatgctcacccggcagtgtgcaggcctggcagggctgcctctaaacccaaattgcagtccccaagcacgtgcgcttgctctgcctgagatctccaatgatgctgctttggcgggagtactgattctagccagtgatttatcatctgtttactcagagaaactgcttgttcatttctgctggtgggaagggaaggagggagggagggaggtgaacgtgtgtcctgtgagctgcagaggtagccggcagggatgacttatacactcccctcgatgggtgacctccattcactcttcctccccgcctctccgcctgatgagaaacagaatgtgctccctcccccctgggaggcttcagattcattttctgctcagacaccgttgcttgcaaaattccacccagaagataagggagggagtatcgctgcagcgtcctgctctgtgcctggttatattactggatccttgtgttgcagccctaagatagaaggattgtctccatttcacagatgagagagaactgatgcgcaggaggctgaaattgtctgaagtcacacagcaggtgggtagagctgggacccaacccccgtcaggctggtgccaacttcatgctcttggagcagtgtttctccaagtgtgcatctcgaaccacctgcattaattatagttacttcttccttcagtctctgttgttttcaacagggagttactgacctaggcatggctccaggctcatgggattcagcaatgaggaagacaggtcctggccaaaggaggccaagaacaaacaagtataagcaataagtcagccgggtgctgtggctcatgcttgtaatcccaacactttgggagtctgaggtggaaggatcacttgagcccaggagttcgagaccagcctgggcaacatggtgaaaccacatctctaccaaaatatacaaaaattagctgagtgtggtggtgcacctgtagccccaactgcttgagagcctgaggtaggaggattgtcttagcccaggaggttgacactgcagtgagccgtaattgtgccactgcactccagcctgggcgacagagagagaccctgtctcaaaaaaaaaaaaattaaaaagaaacaagtcaatatctaacaggtgagagcactagggggaaaaggagagcagggtgaggtgctggggagtgacgaggttgtatgtgtgttgcaattttagatagagtggtcaggataaaccttacacaggtgacatttggactgagacttcaaagaggttaagtgttttgctattgaacctgtatttcctgcacctgcttcagacctcctcattcagaacctggcagggaaatgaggcccaggaatacgtattttaacaaatcctttatccacaccgcaatttggaaatcgctgctgtttaccctggtgcttcttcttctacctaacgggtcaggaaatatgtgttcaaatccaggaatggctttagggattcaagaatgaagctggaatcccgagtcctggtgacgattcccttcatgacttgataattggccaatacttagtaactaaaccaggcaaaatgcacctatgactgtgactgagtctggaaagctctgtgccagggcaggacatggatatgcagtcacagcgtgacacagattactgaagtacaagttggtgtcttgaggagtgcataacttagaaggcttgggttctacgtcaggctcacctgtggtaagcttgggccagtcatttgctttgtggaatttcagcttccaggtttgggaaatggagctgttagacctttccctacttagcttataacactgccactacttctactaccagccaatctatgtatccatccatctatccatgcatccatccatccatccatgcatccatccatgcatccatctatccatccatccatccatccatctatccatccattcttccatgcatgcatccatccatccatccatgcatccatccatccatgcatccatccatccatccatccatgcatgcatccatccatccatctatccatcgatccacgcatccatccatccatcctcaccaccaccatcagtatcctcatttcattttatcagcatttctggcatggcctatattcaaaccaacaaaattccagtccaataaaataatttggacatgcctaacacttactgtaaaggaatttggcctgagaaaataatgaagaaaaactgtatagagagtaattaattctccatacattggatatcaaaatctttaatcttggaagattaaatcttggaagttcttttcaatgaagtccaaaggtgggttcatgccactggcttgggggagccagaaaagtgtcttgtaacttcagttgcggtgaaagctgctgtgaaaggcagcttcagatttcccctgatggcgggcagccctgcctctgtgcccagccctattaactgttggcctcccagttgctgaagccagccaacaacatcccctgccatttgaagtgcttattggaaaagcagatttcatcttggctggagctctgagcagttccttgtgtggggtactccccagggctgtaattgaacacaagaaagcgtcggcctacttttggcattcctgctttcatctcaaagacacatttaaaaatttatatttaaaaaatgtcagggaaaggggccagcatggctcgtgtggccactggtgccagaacacccaacacagccgctccaggagcaaaggctgcggaggatgagacaggagaattaggaccataccgtgtggcagtgctccatgcccagcttccgggagcttgcctgtgtggcctgaacagtgaggtgcttttgaggctgggcctctgtctgatctaggctttgcagagcaggagtttgagggttcagatcaggtccccctcacagcagtccaattgggtgagaattttctaaaagctgggggaagagggtagtccaagacctacttggacactcaccccagggtctgggcagcctggctagcaggagatgcactgtcttcccaagccccacctgttgtgctgctgcggaacgtggttccaagggcttctatctacactggtgactgtgggtgggagaaaaccactgaggaaaaagacctactgctcctctggcaggattctgaaaacagtaggtgtctaacggatgtatgttagcttgctctcacatgtgaaaggattgcagttaagcacaacgcaacctttttctacagctcttagtaagatcttctctaggggccattgtaaagctaaaccacgaagcttcatggagggctgaaataagatagcatacactcagaagcctggtctcttagggaccacccgcttccctgcacagggttactgttgcactgtcagcttgtggcccactatgaccctcttaatcttattcaggaatttttgtttatagggaatcatcattctgtatgcaattggctttccctctgagtgcaggatcctgcacttattttacactaagatcattgatagcttgtgttttctaaaaaagaaaaaaaaattgcatgccttacaacaaagaaaatacattcagtaagattattaaaatagttatcttattttcagg

SEQ ID NO: 871 - DNA, 4906 bp, Homo Sapiens
gcggcgctcgcgaaacccgaagacttgcagggtaagaactgaagccaccaaaaggcttactataccacacaacacccaagccttcctttggggcatggggacagtggatctatggctcctcagggtgccaaccaattgaagaaggaagccagctccactcaacagcttctacaaaggaagggccacaggagaggggcttcagtggttccaggcagctgcttcattcacaacagaatggccattttctccagcatggccaactatccctagtctttttgtcatgacagcctagaaggcagaagctagggccaaggcggctgctaaggaattcctactcctactggggcctaatgtcaggctttccttatattgtggagtgggccctggaagatagttagagacccttcctgctgggcaccctgaagaggagcaagaggatctggtgagcaaaatgaagcaaaagtgcagtgctggagctgacagccctgttccctactgcacgcagttggctcagggctgtcccccactttggagcttcttgccactcacgggctaccctgcacacactacttactgcccaggcctgtctgccaccacagtaccctgtgcctgagacctttcctggcctctgctggatcccaggcctagtatcattcctagggactccagaggcaagtccaggctaatatgctctgggaaaacaatgtacaatgtacatgtttgccttttgacgtagataaatgatacctggatcccaggtctggctctggggcaggggagcttcaggcctggctatggcagaacactgaaggaggtactttgggttttcacaacctcttaaatcatctcagagagagagtgaacaacttactttcacatgcacaagctgccgctggctctgtcacaagaagatggactacaagtaataaaatcaagatgaagttctgtgtacatctttccagcttacaagaattgtagaaagttgaagatgaaagggatattaaagagcatctcattctacctcctcattttgcagctgtaagaaccgaggcccagggagggggactggggaagccaccatcacacagctgctccgtggcaggagttgtgctaactttctgtggctgttgccattacacccagcatcttttgacttttgaaaacagcgaaggagaaatcagtcctcccagcatcttcacctcccacgacgtttattgtttccagctgttaaaaattggccctttaaaaatgggtcgtcttgccagtcattgagggtcaccgcggtggggagtgctgatttagagggcggcagaacagggaggtgattggaggcataattgccagtctcctccttggcacctggggatttctgtcattcaagtctcagggtgtgtgccctcagcaaatactaacccacagagtcaattgctaactgcagtcatctgtgcatttgccctctggggatggaaagccataagaaatgccatttcctaatctagttggccttggatgagaagatgtttttgcctaatggaagcctttggagagtgaataatgtgaataatgtgtatttaggacctacagtgctccccaggatgctgtaagggacctggttataaagaaaaaaacctcactgatggtcttggctttgtccttgtctgagttaagtccttttggttggaagtaatcaacttgagctgacgtaagcattaagggacatagaagagtatagcagtatctcatgaagtccaagggcagatggcctcaaggtagcccgagaagctgctaggaacctagacagtccaccttctccagctttcttctctgcttcgtgtctccctctgcaatccactttcttctctgtgagtagctgggcagaggataatccctcaacaactatcacatctacatcttctctcctaaagagattagccaaaggtgagtggctgtcctcagtccaataccagattcctgggagagggaatttggttgtcccagcctgggtcaggtgcacagcttgatccaatcaggtgtgcccaggagagggtgccctgagacaggcacatctggggacactcatcctcatgaatgaccggacagttctccaggaaagaagagagaagagtggaggtcagacatttcaaatgtatattataggcatcaaattagttactgatacagaaaaatggcaatgtctaagtagggggcttgagaaacagttcaaacactgtatagattttgattatttgcttaacttccaggatgataaattgtctattatggagctgtattttttttttggagacagagtcttgctgtttggctggagtgcagtggcgtgatctcggctcaccacaacctccacctccaggttcaagcaattctcctgcctcagcctcccgagtagctgggattacaggtgcccaccaccagccctggctaatttttgtatttttagtagaaacggggtttcaccatgttggccaggctggtctagaactcctgacctcaagtgatccgcccttctcggcctcccaaagtgccaggattacaggcgtgagccaccatgcccaggtggagctgaatttttttttttttttttgaggtgggaggatggagtctcgctttttcgcccaggctggagtgcaatggcacgatcttggctcactgcaacctccgcctcccaggtccaagcaattcttctgcctcagcctccccagtagctgggattacaggcatgtgccaccacacccgggtaatttttgtatttttagtagagacaaggtttcaccatgttggccaggctggtctcgaactcctgacctcaagtgatccacccatcgcagcctcccaaagtgctaggattacaggcatgagccaccgcgcccagccaatctttttatatagtagatttcttgcaatgtaacccctatcctctgggctttgtgtaaaaagtgcattcagacaatctgaggagtgtcttaattttttgtgtgactatcatatatattttcatcctgttgaggtgtgtttgctaggtggatattgaacatgaaatcaaagtataattttaaacttgtgttgaaatatatgtgtataagcatatgtgcacaattacctatattgtcaaacacccaacctgctttccaaaggatttgaagcaaggtctaataaaaacacagaaaaagtatggccaagagctgtaaacaccaaaaaaagaagtaaagggcaagtcgcaaacagactgcagttgagcaaagctgcaaaggactataataccaggcctgaagtggttgctaaatgtagctctgagctttctgacattcaaagccaaaaataggtatattttattatttaaacagtgtctactctgaggtcctcaaaactctttcagggggcccacagatcaaaactattttcataataacaccaagacattgtttgcatctttcattgtcattctcttaggagtgtacagtggagttttccagaaggcatatgccatgtgcatcaccacagcttaaatgcagaaacagacatgaggatctagctgtgtcctactaagccagacattcaggacatctaaaagtgtaaaacaatgccactcttctcactaacttttttgttttggaaaatatatctttcataaaatattgattatgttgatatattacgggtttgttgttattattttaaatgaattaataaataattttctgatttaatttctattactgtaaatattgatggatatatcctgtataagcaaaaactctctggggttctcaactatttttaagagtgtaaaggggtcattagagaactgctcaagaatgttagtattatttaaagagcttctgcacagaaaaactatcaacagagtaaacaaacaaactacagaatgggagaaaatcttcacaagctgtgcatctgacaggggctaacatccagactctatagggaacttaaacatttcaatgagtaaacaataattaaccccattaaaaagtgggcaaaggacatgaacagacacttctcaaaagaagacatacaagcagccaacagacatgaaaaaatgttccacatcactactcagagaaatgcaaatttaaaccacagggagataccatctcactctagtcagaatggctattattaaaaagtcaaaaaaataataacagatgctgttgaggctgtagagaaaatgtaatgcttatacattgttgatgggaacataaattagtccagccactgtggaaagcagtttggagatgcctcagagaacttagaactaccatttgacccagcagtcccattacttggtacatacccaaaagaaaacaaatgtttccaccaaaaagacgcgtgtgctcatatgttcactgcagcactattcacaatagcaaagacatggaatcaatctaggggtccatcagtggtgggttagataaagaccatgtggtacacatacaccatgaaatactgcccagccataaaaaagaacgaaatcatgtcctttgcagcaacatggatgcagctggaagctgttagcccaagtgaattaatgcaggaacagaaaaccaaatcctgcattttctcacttataagtgtgagctaaacattgagtacacgtggacgtaaagatggaaacagcagacactggagactaccagaggaagaagaaagggagggaggagaaagggagggaggaaaaagggagggagtcaagggctgaaaaactacctattaggtactatgctcagaacctcagtgatgggattaattgaacctcaaacctcagtgtcacacaatatactcatgtaacaagcctgcatatgtgccctctgaatctaaaataaaagttgaaattattttttaaaaaaagaatattactattatttaatca

SEQ ID NO: 872 - DNA, 1480 bp, Homo Sapiens
ggtcctttcattttataaattagacctgatattccctgtgttcttcaaaatgaaacttaccataattggagacatttttcctaaaatgcatttgaaatggctttatttttttgcatgccacaaaaataccagatttccttgtcagttatatgttattcttgtcatgaagtctcatcagaccttctaatttgaaagttatcagtaattgatttaatcacagccatattaagtctctgtcacctacagataagttttgttttactctcaggcttccatggaagttctgcaatcaaccagcaggagaaccgcttaaacccaggaggcggaggttgcagtgagccaagtatgcatcactgcactccagcctggaagacagagtgagaccctgtctcaacaaaataaattaaaataaaaaataatatatttttctaactatcatcccttttccaaatcaggaattccccttaagttttcctcaatttccatggcaatatctttgcatagattcattaagaatttgtcctttttaaataaaaaatataaagggaactattcattaggcaacaaatgccttgtctgaaatatcacatttgagaatgctgctcatttaatcagaaaggtacgctactttaaagaactgaggtccactttctggagccaaaaactcataaatccctctcagaaaaacctgatttgctttgtagggtctcaggtttagagatgctgaaaaagatattttcgttgcagacaaaggacctcagagtatttggagaactttgagaagagaggaattctcccaaatgtataggtgtcacaggtaaaatacagtcgagagattttcttggactttaattccttaaatcaggatagcaaataataggggcttttacaaattcaatctgtttccttacaaaaattttcagcaaagtaatttcagcaaattaattttcagcaaagtaaatgtaagaagacttatgtgaaaaattaacattctccatgtatctatgaagccaaacctaataaaaccagctttaatttgtgctcaagaatattatttcactgagttttcttaaatcacaaaggggagactgttatgaaaactgatataaaataaaaaaaacaaggaagaaaagtctactagatgtctctaatggaagactgcatttttagaacatatccttataggcgattctagcctttctctgctatttggctctcacactctttaccgtgcagataattcacagcaatgcaaaagaatcctcatctatagccatgaaaataagttatttgttatttctggtaaaggttcaattgacctccccttccaggatgaagaaagtttcatgtctttctgcatcatttcaactattccttactacatataaatctgcacttgttaacttctattttgaattgattgtggcatctgcctgcttccccattaaaactgaataaaatctttaacacataaaaatgt

SEQ ID NO: 873 - DNA, 6936 bp, Homo Sapiens
actctcactatgcccccgtaacagagtcagtttttaggcggagggtgagaatggcttgaaaatttgctgaatgctatccatctcccagcccccagagaaaagggctttagttcctccccctgcctgtgaagtctgcaggccagattcgcgccctcccctgagttctggccaggaggcttcttgccctgttcaaatggttacaaagttcagctagagaattccttctccctgtagagttttaccccctgctcctctggccgccctccggatggatctttgtgttgccaggcaggaatgggctgcttggggacccagtgagctccgagggcctttctgctgcttcctgtacccctgtatttcgctcagctctctgacttgactcagctccagacatctacccctggagaaagagcccaatgagaagtaatctctgaagcccagatttcctaaggatgaagcttcaggagaggccttatcaatcctgacaacaaacttttctcgtcaatttagtttcatttaatggaagttttaaatgtgtaaagttcagaaggctattaaaattggttccagctatctaagatacacacacaaccacacacgcgcacacacggtagagataaatatgttcgaaaatccagctcaatgttactagaaaatttgatcagaatctggtgaaataaatagtaaacttactaaaaatgccaaatatcccagaagctgcttaacatttgatcaaaagctctgtccagtcaattcctgcttctttcaaaaatactctgctgaaaagccaaaggagaaatggggctggtaccttcaatatagagaattccaagtaagattagatcccagaaggcttagtgtggctttctaggactctcactattaggcagtaacctaccattcacctctgtttcccagattcaccttgttataccttataacttaaaatataaattccaacaatgtactgcactcaaaaaaattatttctcaatttgtttgctcatactattgatttttttctagaatctaaataattgtgaattaactatgatagcagtatgcacaaacagtaagtgaaatcagacctattaattctgagaggaaggaggtgtcaggattttcacagaagaagagcactaaggccaggcgcagtggctcatgcctgtaatcccagcactttgggaggctgaggcaggcggatcaggaggtcaggagttctagaccagccagacaaacatggtgaaaccccgtctctactaaaaatacaaaaattacacgcctgtaatcccagctactcaggaggctgaggcagaagaatcgcttaaacccgggaggcggaggttgcagtgagctgagatcgcgcgactgcactccagcttgggcgacagagcaagactccatcaaaaaaaaaaaaaaaaaaaaaaaagcaaagcactaaatctcgtatgtgaaagatgagtagatttttcctaacaggagcaataaaaattagagctaaaaataatttcatgaagcaaaatattcaaagaagatgaagaatgaataaagacaattgatctggtaattcacaagccaagcttcagtaagtggtaggatagacgctgatttttaagtgtaaaatgagcaaattatgctgaataaagaaaattatttaaaaattgtcaagaaataactagagacccagggaagacaattttcattttaaggcttaataatgtttgcagactgaaggaaaagatgcagtggaggatgagagaccttagcaggggattaaaatagtggagcatttttgtggcaatgccattcaataagaagacagcattggaaagaagagagacatttattcctcctaggtaggaagcaaaaagtagaaatttgtaaagaaaaaagtattgggagataaagaagaatcacaggtgtaatcctgaacatcctaaatcaaaattattgtttatgtatttctccttccagaaatgaaacttgtaatagacgatctgtggcttaataaccttctatctccagcacctgacgtatggcaggtctctcaatatataattaagatatggatctatggaggtacaataattcttgttatatgaatcactattcctgaagttggagtatattggctcatctgggaatagggaaattggcagttagttgagagaccattggaacacctgctgaaagaaacgtgataatgattcaaggggaggaaaaaaaaaaaaaagaaaaccaagtgaggaatgaccacaataacactaacttgaagtggatgcagtcggcatatttttgaaaatgttttaaatcaacaacttctatttggagagcagatgtaattacaccagacagcagagataataaataaatatcagtgcagtcacagtggtgtggccggagtatcagtgcctcggttgctatgggcagcagaagacacagatgcctctggcatcctagctggcaatgaagaaaaataaacacagaattaggcttcaggttagagaataacagaataatagaggttaggatttagacagaaaaaaacaggcttgctggagttatggaagtgggagagacgaaacaagtgaaaaagaacttctcttcttgtaatttctcatgttcaaggaaaggaaatgtcagcattcaaaattgcagagaatgagaaaacaaatgtgatgattttgatcaaggtcatgtttatgccggtgattaacagataaaatgaagagtccttggcatcataggagggactctgagccagagtgctaaaaggaccatctacttaaatgatggagttcataataagattggagtggagaaaaattatgaagcaagtactcagaaaatgagaatgttaggaggttacaggttgatggctttaaggatggagagaatatacgttatgataaacataaaaaagtggatggtggaacaaaagttgcctgaaattggcagctgtgagtaattaatctttaacatctcttccttacttaagtagaaaaagggcctccatcaaaatggtagtgagaattttatccatcagagacaacacactttcagttgcagatgagacatggaaaatattctcacacaaaatgtggtcaagaaaaggagtaatagtacttatttttctaattgaatacataataatattaatatacattatctgtaaatattcatattgatcatgggagaggtaatcagaatatataatattgacagctgaattgaaattaatatatttttctaaaaaaatgagattatgggtaatgaaccaatattggctaggtgaaaattgtctagtttttacaactagaaatgcttcctctcaaacacttatcaaaatcacaggtgtattttaggctgctatatttgccaaatgaaaacaggatactgacattcatacacacaaacatgcaagcatatgctgaaattttcattccagatgtctacaaaagagaacagataatacgaagttcgttacctatttcaagttacctctgagattccttacgctgaagacaaatattctattaaaaaagagtccttaaataggccataagaacccgaatcctttcataaagagtgaaagagtatggttatttttgataacaattattatcaaaataaattatttttacttctaaattagtactgattacatctgaaggtttttgtttctctgataccaggatttaaaattatttcagaaagcatgattagttttagtgtctgtagatctttgctgtcagtgaattaaagtatttttgaaaaaggaatatgtattcctgaaaagtgatctatactttatagaaaattacctatttgtgtaaatataggaaaacagctctaacattaaaatatgtgcatcaattggattcagagtgttgcatgaggtttcaactttaaagaagtatttataacatttggagaaacaaaattaacaagaaaaagtaaaaccaaaatattaaaaataaaggtaatattcctcatcagaaaataagaaaaaaataccaacaattgtggtaataccaaagtgattttaaaaatacattttttttttttgttcattggttgtcttgttcaattcagtcaaacataagccaacaagataagactccacatagatctttttaagttaccaagtgttgtgtgtgccgctctaactgtccatggtttctgttttttctactaaaattctagcatactaaattctgtatggtattttttctagcattatctctggaaaattagaccagtgactaatacaattactcttttagttttcatagatttgactatatgtctgagcctggagttgtttgcgtttattctatttcggagtcactcagtttcctgagtctatagattagtttttcaccaaatttgggaagttttcagtcattatttcctcaagtaattgttaagccccatatcctttttcctctcattctaggactgcagtgacacaaacattaactatgtcattattgctccagaagtctttgaggctcagtttttttttttcttatctgttttctctcgttgtttagattgggtaatctctactaatctaccttaaatcttactgatcctttcctctgtcatttccattttgtgattttgtccatatgctgagattgctatttggaatatttttacagtaccttgtttaacattcttgctcaataattttaacatttgtatcatcttagtgttatagtctattgattgtcgtttcttacttgatttgagattctcctagtccttagtatgtcaagtgactttggactataatttggacactacatgtattatgacgtaagactaaagttattacttcgatcttttacttaagtgggtattccacctgtttagtttcaaaatacatgtcctagctcacttttgttagctattgttcaaatttcaatttggtttctaaatcccctggagtccagtatcccccagtcacagttgtatgtgactcaggtgacaggactctgccccacaatcttctcatcatggactggggagacagaggaaaattacttcactgccacagaggatggtggaattcagagttccaggcacatgtccatagggaaatggcacttacacattaaaactggtcagaaatgaatggcagagtgacacccacaggcttcagtagatagcggtgcctcctgatactgggatggggtggagaacaggcttacgccccatatctctgcagggatggtgagactgcctgaataccatggaagagggagatggaagtctgagctgtgcacataagctccactggggagaggtacaacccagttactgcagaagaagggagaaagtcagaggggtcatagtctctacggggaaggaaggccatctcattcctgcagaaggtgggtagatgtgagttccacccacaacctccatggtggggggatgctacctccttactccaggaagagggtggaagacagggttctatccccagtcccacagttatagcactcattgaggtggagatagaacacattttttttcatagtattcctcttgaagaaagataagtatggttaaaatatttctgctatgctgggttaccctttttcctggtactttcactagagacagatgatacagaagagaaagggtgggagggggggagagatatagaccacaaagaaaaatagaaaggtgaataattcctgataatattagatgaggttatttattaagacctactttacacatttactacaaggtataattgacaaaaggtaaagatcatttgtaatgagaaactttctgccgcttgtataatacagtgtctgtactttcaccaatagcttctctatttaacattatgtggttctaaataatctttcaaaacacatactaacctgtttctctgtaatatcatctcacagacagatttaaggataagttaagtgttttaaaaatctatttatattaaattatataagaatggaggcaggaagacagagcttggaacattatctacaattagtgtcttatattgccatggtcagaatgtttgtgtcctcccccaaatgtatatgttgaaacctaattcctaaatttgatggggtttagggaagtgatttggttataaaggtagcaactgtcatgaatggaattagtgcctttatatggggctgaagataccagagttcttcccttctactctgtcaggagatagcaacaagctggctatctgcaacccagaagaaggccttcaccaaaactcaaccatgctggcattctaatctagaacttccagcctccagagctgtgacaaataaatttctattatttataggtcatccagtctatggcattttgttataacagtccaaactgactaaaacaaccacaaaggcagaaaatgctagttttctactaaatggtcataaagaattgaataagtgatcaaaaaaacatgagacagctgtctgtaaatttctgtacccccttcctccatcgtaataaaaatttttagctctacatacagatacaggaaataaaaaatactttccaaatttgcacctgggcatagccaagcaactaacacttgcattaggatgtgggtaatgggtatgcatctgcattccgggagatgccctttgataaggtgtgccatcctttttttctcttcctcttctcacttgttcatattgaacactgaaggggcagtatagcatcttgggaagcagcagagttaccatatagacaagtagagaaaacttttgactttgcagagtggggctgtgttgactgcttgacattttacaaaagagaaaaaatgaacttctatcatgttaattctactcacatttgggattgtctcgtgcttaaactcatagccgaactaatacagaaaggaagagagcatgaagaagtataacatttc

SEQ ID NO: 874 - DNA, 16942 bp, Homo Sapiens
atgcactattaccactgagcatttactatgttccaggccctgtgctaagcgcattgcctgctgcgtctcacccttcagtaggagtagttacctccaactcccgccagacccaattcagagctgccatcaggtcagacctttgcctgctcttggcaacacgtccccctgtcctgctcctctgcaacctgcccctctttttcttcatgtgctgtgaaggcaccatgtggatgggtgttcaacttctggattggggatgcacagagcctgagggacacactttgcaaacctgcaccttgcacttttgggttctggcctgcaaggtctcctttattcttttggaccaaggctgtccctgggagagggcagccgccggcctgtcagagcaaatcagcctcaggcggtttctgcggctctggtatttgagctttgttttccctctctcccgggaagaactcattgaaatagtttctctgggaaagacaaagcgtctcgcccagatgctgaaggatcacttggtaactgcctgtcttggtttcccgttgtgcccatgaaggcgccatcagctctaaagctgacctgtggttccgtctccaaacagctaacccagacgtcacccccttgcagccagccgcacagcctgagttggagttctggcctctcctagcagtgagtgacagtgttggaggggccttggacaccttgggtaattgctaactaaatatgagcagtaggggaaggtcttctggtccacggcagagccaacggggcacttcctcttctcttttctagtcagggtagaaagctagaaagaatcctaaaaatcactatccaagtccccattgtgtggggacagaggcctggcctgaagcctaggctggagggttcagtcggaagcagaagccgggagactgcatgagagggttccttccagcttcaccaagcccgtgctgcgcgggatgaagaaagtcaagcctgtcttccagtggggccctgaggtgggggagctggaggatagggtggcagcttttttatcagctgtccccaaaagaggcccttctcccagttgccacggaccaaagctcctcctgggagctccagcctgtctgttcaatgtttgccttgcgccttttcctggtgaggccacccccggcaccatctcaggcctcagaaggacgacctcactgaaacagcccttaggttgggaaagaagcaagccctccgcgccccgtccaagtctctcaactgggcacgagcacacacagacgcccaggccctgtccctgcgccagaatggccgctcgcgtttccaggcacgatgcccctttccatgagtgcacagagccctgggctgagctgggggccgagctccacgctctctgagcagctctgagcggcacgccaaagaaggtctttcagatgggctctgggatgtggaaccatggcgtccagccctagcgtcgactccacactagaggcaccctgactttcgcccccttcttacctgagtatcagcttacttccatctggggactgaatatggggcagattccagaaaaaggaggttggggcaccaaaaccaacaccaactctgccaacggagccagcacagctatttgtctccaaccacaggccgcaagggaagttcacgggctcggcacccccaggtcccggatgtaaggatattgcccgttagacaaaggaaaggccccaagtccacaactcatgtttgtgagcttaaccttgtcctataaagcactttggaacaggcccaggttctcccaccatgtacagctgccattgacctggacagtcccgcaaggtccttcagtggaaacccagaagggagagtcactgcatgtgaaccctaagggttctggaggtcaaagttgctgtgggtgacaggcaaccaagactaagggcaaacttgaaacataaatgagttaaaacccacaaaaataagacagttttaaataactaaactgttttctcattcttcctttttcatctgaggacgttttaggcaaatgaagctttagagtttttctcctttcattgggttgacagtgtttaaaattatatccagagctgtctaatttgcctattgctctaggcatactgatcctcaggaggtaagattggatgggttaaagtggacaggctcaggggctgagactgtccatctctctgagagtcgggggcagcatttatcaggggcctgtggtcagccaagcttggcttgggctctgtgggaagataaaaccaactggcccagatggacttctgtggggcctggatactgttgggaagataaagcacataagcccggtaagaaaaaaaaaaaaaaaaaaaaaaaaaagcccaggagaaggaatgcaagtgattccaatgcaattgaattaagtacaaactcactaggaatgggggggggggtttgattggcgaaggggttagtcaggggtggttaaccacagaagattgaggaggtgaactttaagttggacttggaggtagaagagagaagttaggggaagcatttgttttatatttgggtggggtgcgtgggagtgtggataagtgaagtgtcacacacacacacacacacaactttgagtaggaagagggtcaagatgaccaggttggcctagacaagtcagtactagcttaaaaagtcacactcaggattcctgcagcacctcccccatacccacccccaccccaatgggcacagcactccctcttctctccaacgcaggcctcctgtctggggtgctatgatcatttccatagcaaccaattgctctgtgacagagacataattctgactccaggtaggttatgaacagaagaaacatatgaaaccagtaagtgacagagatctagttttccagtaagtgccctgctaataaagaagagaaaatgcacaaactaaaagataaatggaacaggaatgagcaaatgctaaattttctatgaggcatcagctgtttgtttgctaaaaacaatagcaacctaatagtttcaacaagaatggtgctggcaaggacagctcagaacagcctctgtcagtctgcagagtaggggcgatggcagagcccgggtatgcacagtgtcagggttgtgaggcagaaagatgccttaaacgcatcacctcaatcctgcacacatccctagtgcctttattggaaaagctgcactgctgctgctgtgaatccagcatgacctcgccttcattcattcattcacttatacatgcatgcatgcatgcatatattcaagaactcatcagtgctaggtaggttactaattagaaataattgggagaaaagtctgaattactaggtattttagaagcaaagctttcttactctgaaagcatggctgagatggtgccttcagcagggactcagagagtctgatccagtctgggtctgccactcacactctgtataaccttgtgcaagccacttaccagtcttggtcttcatcttgtagatgaggtgattggtgatctatgtgatgcttccagatctgtctagttcagaggcctgctttaagtgtctaaacggttaatgtcagagtgagttgatgtgttcggtattttcatagagcagaaccaagactgtttactcatttaccatttatttccaccttctgttgatattgattgaccacttactatgtgacagtcacagatctaggcatcagaaataaaggtaagacgtgatggtggcttcagggccctcatggccaggttgggggacaggcaggcccaggctcagacccatagggcacaagctggtctccaagtgtggacagagctcatcaggtgtggggaagggcacctccacctgtggtcaagagctctctccacaccctggatggggctggaaggaaaggcaggaggcagactcagagaggaggagctgcatggagagggggtgctgaggaagccccacatgacccaggaatcttgcggggagcggagagtagagagatgcagacaggccatgccaaggcccgtgctctgacatcatggtcatccttctcaaagatctggagattaacagaccacatagaagaaggggcaataagttaaggagaaagaaaataagcagaatcccaggagagaagagcataaggtctgggctttgtgcaggcatatttgcctccaggggagataccagttgctgcctagtgctgtcatcactaaggcctggggtgaggctaagaggtggacacctggggaggagctgggagtgagtgcccagactgggaaaagactaagggaacatactaggctgccagaaagcctggagctttctgaactcacctgaaccttctgagctttgggcagggtgctttagtctgccctaaaaccggcagagggcttaacgcatggtttcagtgcagagcaatgtccatcttctctaaaacacccagaaagatttggtgagtgaattacagactgtggtgctaaggggagtcttagccaaagagacaactacttgcctttgagttttccatgcttgtctacttaacagaatcatgaggactcccatatcctctcctaaaaattaaccagttaattattcaacacgcattttgcagcagctagttggtattattcgttatgctacaaattctcagggctcaacagaggcattgttcatgtccttgaggagtttatagtacagctgggagtttgcgtatgcaagtgaaagtttatatgcactaagttatatctattaagggctaaaccaggagtgcaagcagagaggattacagaggtagaagagagagagcgcgtgtgagactgtacatagtctcttgggacgggctgatcaggaagtcttcatggagaaggtggaatttgtgtgggttttgaggacagctagatggaaagaggtcagaacagagatgtgtttgggagagacaatgctctgcagtagcatttagcagctgctacttgtctgagaggaaacctgggcactagcatggaaagaggacattttctgacattggaaatacacttcaatgtcaacctcgatccaagtttgaatcctgtgtctgccacttagtagcagataggcctgggcaaattccttaacttgccttatctaaattgccccatttatacattgagagtggggataatgttgatctcaaaaagctattgggaggatagaattaatgtgacaacaggtaaaacacttccaggaatacttatcccttctccctttcctggcccatcaggaaagctgcatttaagaccaaaaggaataattattccagaagtcctctgagtgcccttgtagaagtagataaacagattgatcagtgagaaaaaaaatatgttctcatccagcctgtggggtgagttaaccatgcatgcttttctccggatgtttgacttcctgaatctttcctgaacaatgccatctctgtcctggcacccctggcaagcagtcccatgtgagacaggttcttgtcacatgtccttttcctgaaatgagtcactagagagtgggctgtagtcataaccttcaccagttaagggaggtgaatgtggattggaatgaacacaaacacggtactacttggtgcttaatgttcctttccatcaacattttgccccaggccttaaccttgcaactcaaaaaagtagggtcgcataatgaatgggataaactgaatgaccgcttgtaatccacaaacaaagggcctttcaacagcctatggtcggaggccttatctattccaatcaaatctagccagttgcaaactggagaaaaaaatgggtgatcccagtgagaattagtcccagaagaaaattgaaaaagacattttgttacctcctcaggaaaagtgataatgagcagagaagggaaaaatctaaataactgatgcaaagacaaagaactgaaactgagagaattggatgcatgtcttccccctttagttgtataagcataaactggttttatgacggcaagcataaaattaagatcagcagtgcacaaatctctgtgtaaccttcaagaccttttatttccccaaattagaagtgaccttaagaactgatggtgtcttcaccctgggcagctatggtggtggagcagaaaatagtagactgggattgggacaggctaagtcccacccttcaccctggctgggtgaccttgggcatactcacccttgcttttctgggactgagggtcttcatctgagaaatgaatcatttttcttgataatttacagttttctttcaaatccctccacacccccacccccaccaaggtttttatttttatggcaactcagatcttgaaccttaaaaaaaaaaataaagtagagaggacagcaatccttaccagtgtcactctatcaccctatacagctcctcaaacacaagcccagaaggggcttcattttggtggaagtcctgggcctacatttgtatatttaagtggaacccgaatacttgctcccagagtggtgtcagtggtcaccccaactttccaaattctggcaggcacagcaggtcattctgtgagctgttctcattcacatcctatttccaactggttctgttccacggagccccagctgtactctgcaattcagttctaccaacgctcattgcatgttgctgatatggcaggcactaatgtgagatgctgtgagcaagcaagcatagcccagccccactctagtagggaacacagaaatacttgtaatgtgagccgaatggaagcataatgccctgtggcaacacttaggagggtgacggtcattctagcttgggcaaagcttcatgggggaggaggcctttgtcctgagctttgtgagatgggtaggatttaggcaggctgagacaaaggaagagcatgccaagcagaaagaagagcaggaaggaaggcatggaggcagaagtgttcaagtcatatttaaggagtggcacttgctggatctccaagtgtcttcagagtgatgagcttaggaattcagggaaaggccttgtcatagaaagccttcaggattctaaggaatttagactttagggcagaaaatgggaaaccatggacattcttgagcagggatatatcatggtgggacttgtgcctcaggaagagcaatccatcagcagaaaggcttggagagtgagtagaggcagaagaacaatgagggcattattgcaaaagtccagaccagtggtcacggaggtctgaagtttagtgatgagaccaaaattggaaaggagggaactttggacaggtgctgtagcagcaacagaatggaggctctggggcttatggggtatggggattaaattcacactgaggcaggagagtgttgagagggaatccagccatcttctcttcctgggctcacagggtggtttatcctgggggttgttgtgcagcagttctctgatgtcaaaaatgagcaggcttagggaaattgatctactttggtagagattgtgggctgtccaccaatatctagctaccttactttattaaaaatagaatccttaatttttagctaggcaaatgcctcctacccctagttggaataaagacatttttcagttttcttgcatcagaatgggtttgcatgagtacacctgggcagtgatttgtcagactttgggaaaatatgatttttttgttggcaagaaagcagcctggatggagctccagtgaccatcttaaaccactagacaaaaactcatgttgaagataatggagctataagatagtgactgatgatgactgtagagttgccatacttgtcccaggctgccaacatctggatttcattgacatgggagagaaataaatgtacattttatttatgctactgttttgtctgttttatgcaaccaaatctaacctaatctttgtccatataacaaaagtcaaaagagtataatgcaaactcatttataactttttaacaatggaaatatatgtatctcatctaaggacacatcttccaaggattttagcacccaagaagccaaagtattcattcaaagattgaggggtgaccagagtcttggatggggcaagtccatcaggtcagttcttgggctttagtccatcaggctctatagaaacttcaccaactctctttactgcacaaccaagccctccactctcatgagaggggagctcatgtcctctaagccccatgtctctttccactgaaagagcactgctctcagattcccattttccccaattctattcaatttgtgtcttgttaacataatcttcctttaaatcagatgcaatacaactgaggatgactcaggtcttggagttggaatcggatctgagtcctgccctttctatacttgacctcttaactggccagtgactcatttacacaaaatattttgggttggtttggcaagtgttcactgcttagatactttacattcaggatgtactttatcatattaagagtataggggatacattttcttacatactaactgtaggggacaagtacaaatgaatagcccaaaccgaggctgatgttaaaggttagctgccggggaggatggaagaaccagtcttcattccccaaccctgtaaaagacatctagaggtgaaactggttttaccaggaagatgtcaagatcagtttaagcctgctgaagtggaggttctaatcaatatctgataatatctaagatgtattgagcacttgctttctgcctggcaatgttctaagcacttagattcatcaaacgcatcacctcacaactacatgaggcaactactcccaatacccccacttgcagacagggaaactggaagctagagatgaagcaatttgaccagcatcattcagttagcaagtagaagagctgctacttgaatccatgtgtttctcatcgcagagcccttaactattaccttagttgttcttagggagcttaacaaaatttccttcctcacaatctccctcttatcagaatgtatttcttctctatgatgccaattccatacttgatgctttatctgagaaacctttacaaacaggctggtacttgccccttctcaggtgacaacattttaagtttgatagaggttttgcaaaggtgtactgataaatccactggaggaagagttacgggtggagaaaactcttaatctgtagcctttgccaatttccatggtgtaaatactcccaccatgaccagtgcagctggtaaatttcctgaatatttgatgattgcctcctgcccagcagctccagcacaccactgggccgagggttctattatagctaagagtgcccacgctggctgggaattctgggaatccatggccagcctgagagagttctggcatgagagagccttgcagtccccttcaaggcatacctgttaggggggtccccagcttcttttcttcagctatctggcccagggcatgctgggaggtggtgctgtggcccacagagaggctacagacctgggctcatggcccagtctccctcctgaggctccagctccccttctggaagcagcgctgtgaccagcaggtggcagcactctcacgttcaagagtctgtgcctcagcaaaatgaggggcctttgttctgagccagaggctgtgtcaccaagagaaaggccctgaggggccagctaatcagcctgtccttagctgacctccatcaatgtgagccaagtggacagtctctggcagcgtgataccatgagaacaaccttagcaaacagcagagacagcacagtctcaacccacccctgcccatcctgagggcttggcctggggaggcctcataaaaacaggtggggctccattcaggaagggaggtaaatgccaagagtggcgcttccagtgctaaggaggaaaagactcctgcttgctcccaccaccagctatgctgtggtgccgccttccttctctgctgactccatgggtgctcagttcccaccaggtgaccagctgttccagcttgcccaggactgtcctggttttagtactgaaagtctcaggtcctgggaaaccccctgtccccagacagcaggccagctggccatctgaactcccagtccctgtccatgtgcaacgcctgcctagcacacagtaagcactttcgaaggcgttgctgttgcaggagaaggcaaagcagaattcaggtgggactataagagctgactgaccccgatagacaggttggttagttagttaattggtattgattgattgatttaatttatttagaggcagggtctcactctgtcacccaggctagagtgcagtgtcacgatcatggcttgctgtagccttgacctcctgggctcaagagatcctcaaacctcagcctccaagtagctagtaccacaggcacatgccaccatgcctgccaattaaaaaaaaaattttgtagagatggggtctcgctatcttgcccaggctggttttgaactcctgagctcaactgatcctcttaccttggcctccccaaagtgctaggattatgggtgtaagccaacacaccctggcctcattccattggtaaaagctgctccctttgctttcggtcagaggtaggagccagaatgtgtgaggggaaatcctcaaaacagtccgtttcttctccagctcaccttgtatctttgacctccctccctcttccttccctctcatgctcgcccgcctgcctcaacaatctcaccctccccagagtccagaggcagagaactccgtgttccaaggaagggtggagcctcttagagtgggcaggtggcagggctggtaaacaggacaggccagaggaggggttgaggcaggccaggaggcgcttcagccacctagacatggagcagcgggatttaggcagcccaaagaatctgtgcgaggtttcctggagccctccccctcctgcccccacatccaagcagggatgtgcacattcctctttcctcctctagctcaatgtgctgtggcttatctgctcacgtcactgttgacccctccagatggttcacttggactcccagtgcctagcttggggagtcaggcacggcaaacgccaccctgtgctatggcttgaaggaggccagcaagctttgcttaagccaaggcatgtgtgagaaacttgcaaatccttcttccctgctctggacatggggagaaaaggcagacttcttgccatggccctcaggttctgcacagaccggcccttgtcaattctccaggcttatcttgtgctgtgtttcccagcactcagtgtggccatcatcctggccttctgccaggccctgctaatgccatgctcactcctgcctcagagtcttcactcaggctgttctctctgtctggtcaagaatagcaggcagggtctggtttagacatggtcgtccaagaagccactgtgagcaggggaaagtgaagctttgatctggaggatgtgaagggtcatggtgtccacctggggaggaggtctgctctgacaagcacactccctgtggtggcaccagctctctgtcaccctgttaggaaggagttaatgggcatttccaaaggcaaacttctcatgggctttctgttttaaattttctatataactgaccactcctcatatcaaactatcatactcagcgggtttgtattttcattccactggtgacaaattaatgcaggcatagccctattctggataaaaattgaccatctcagtgaaatcctgctgactcctgtctcccagccagcacttggatttggtggagcctgcattaaccccagggtctcaatagagattcttaggtcttggagatttctactaaaaggcccactcttccaccttacagaatataggtcagaagtttgggctacttcagctgccagatcatagtaaataaatattgagtttattgaagaaatactgattttatgacatagagtttgccaagtaagccaaatcctagatacagtgcacagcaactctggttattaagatatagatggaaacccaggctggcaactatagtcccagctactcaggaggctgaggcaggaaaattgcttgaacccaggagttcaagaccagtctgagcaacacagcaagaccccatctctaaaaaacaaaacagttcaaagctttgaggaggtggtgaaagcctttattggtgttaaatactccatctcaagagctatagaaagatcttaactcttccagagaggccatagcctctgtgtaaagcacactgtgtaagctccatgaaggacacccaggaggcacgcatgcccagagaggagcggcacctgctcctcccctaccctggaaagagccaggccatgattcctgtggaaagtgctgcacctcacccagctgtgagcaacctcttcctgggtccttgggggtggggaaaccaaatccctgggtttgagtagtatttggtcttttccaagagcctgtgtctatgtctgcttgctttttgggttagctccagccaatccctgttatctttcacagaggaagaagtatccagctgttggggaaagtcccaggatctggggccccgggccagttacagggatgttgggttatggctgctcttttctttcacctatttgtctagaaatgcaaactattcaggttgcccatagcaaagaggccaaggttgggaagctaaggcatggatgtggtgaaggagagttggaggaaaaggctcaaagaacctctgttggtttttggggggtgtgacttcaatcttgttccttcattcctacgtggccgaagagtccccttgagtgacctcaccttcacccaacccccacccaacctgcttattcacctacactgacacctgcccttcagtaagaagccccaccctccccagaacacaaagttctccctagagtctgggaggaagatctggggtgtgaagggatgaggggagggcagtcagggctggaagtgagaggaagaaagggatggttttattgctcctctctcgtactctggctcctgccagagctaaggtagcaggttttaaaaatgaaatgaaagcagctcttgcttgttagagttggtcatcctctgtaggcccctttgactcgcctctctccttcaataacaccaactcctgcggcaacatttattgtgtgctcacgggggccaggcattttgtgaggctcggggctgggagttgatgctgtgttggggtcaacagtcaaggggacagctaaattccagcacagtgaggtttgggccacagtgagtggtggaaatataaaagctcccctctgagaattggaaagcatcatatttttaaacaactgttgctggagtttaccttccttcttaaaggaaccccagctgcctgttcccatgatgccactgctggagtctcagccctgaggttgggcaagccgggggttgagactgtaccttctctgtttactgaaggtgttcctgtctatcttactgcctatgcactgtggtccccacagctgaaagtcagtaggcagaacagctggcccggtaggacccatttcttcaatgaaacagcctatggcccagacaaaagcccctgcatgggtgggtggaggctaggatgctctggtgagccccttggacgccattcctgtagtggtcacattggaatcaagtccattcaccgatggtcttaatgtggacagaaaattgaatttattaatggtagatgtaaaaatataatcaaacatttccatccatatcattgagtcctatccaacaataaaaaggaataaactattgatacatgcaacaacgtgggtggatctcgaggcagttatgtggtgaacaaagcctatctcaaaaggttacatactgtatgacttcattttgtaacattttttaagtgaaacaattatagagatgaggcacaggttagttgtcaggaaggagcaagtgtggccacagaggacagcacaaagagtggcttgtgatgaaacagcgccacacaggtgataaaattgcatagagctacacacacacacacacacatacacacgcacacacgcgcacacacacgagtacttgtgaagtctgaatgagtctgggttgtaccaatgtcagttccctggttttgataatgtattatagtcatgcaagctgttacactggattggcctagtgaagtgtctgtgggactttcttgtcaatttttgattgtggtaaaatatacataacataaaatgtaccattgtaactatttttacaggcgcagtttgttggctttaaatatattcacattattatgcaacaaacaccaccatccatctccagaggactttttatatcttcccatactgaaagttcataccaatgaaacaactcctcattcccctcacctcccagcccctgacagacaccattcaaattttcgtctctttgaatttgactactcgtataagtgcctcatctaagtggaatcacagagtttttatctttgtgtaactggcttatttctcttagcatagtgtcttcagggttcatccatgtcatagaaacatatcagaatttccttcctttttaaggctgaatactattccattatctgtatgtatagtagcccatccctgcttatccacaattttactttccttagtttcaattacccacagtcaacagcaatacaaaaatattaaatgaaaaattccagaaataaacaattcataccttttgaactgtgagtagttctgagaggtataataaaatcttgctgaatcctgctaagggcatgaaccctccctttgcccatcgtgtccactctgtctacactctccacccagtagtgacttaatagccatctttgttgccaggttgtctgccccagtatcgcagtgcttgtgttcaagtaacccttattttacttaataatggccccaaagcacaagtgtagtgatgctggcaactcaaatataccaaagagaaaccataaagtgcttcctttaagtgaaaaggtgaaaattctcggcttcaggaaagaaaaaaaatgatatgctgaggctgctaagatctatagttaggaatgaatcttctatctgtgaaattgtgaagggaaaaaagaaattcgtgctagttttgctgtcacacctcaaaccgcaagttacgaccacaatactggtaagtgtttagttaagctggaaaaggcgttaaattgtaggtggaatatgtgaacagaaatgtgttcccactgacagcagttgggttcggtactatccacagtttcaggtatccactgggggatcctggaatgtatccccccaggataaggggggaccactgtaccacatttatccatttatccatcgatggacatttgagttgtttccaccttttagcaaccttctgtggatttataattctttgaaaataaaatgttaaaaaatacaatcagaaatgaaatctatgaattggctcactctttcacctactgagtatgtaaactagtgtttgttgttgacctgttgacttttgtacagttcccatcacagagacgatttaagcttggtaggccatatagaacctgattttttctttcctgcttttaaagaagcaacacgtatgattgttcagaggatagtatgtgatattcagtgagctttaattaacctggcccatgacactatatacatgcttagatcaagaaataagaaaggaaattcagaggtctcttgcactgacaggtgatttcaggagagacaatgacattaacattgagccagctcctgactatacagaatatgaagccattctttttttttttttgagatggagtctcactctgtcaccaggctgcagtgcaatggcgcgatcttggctcactgcaacctctgcctcctgggttcaagtgattctcctgcctcagcctcccgagtagctgggactacaggcgtgtgccactatgcctgactaatttttgtacttttagaagagacggggtttcaccatgttggccaggatttctaatgcaaccaggtaaaagtaattagcaggagaggggaatgcttggctttggaggactcatttgcattgcaaagtatttcccattggtggcttggccaggcattcctttgtccagccgtgtaatggtctcaagactgcggagcatgttcacgcacagcatggacaccacttcatgtaggggcactggactgcctagagttggaggaagggaccctgtgagtaagcatgacctcatcctgggagctgcatggcggtgggcctgcaggtggggaggagagggtgggcgctcacagggcaagacagaggctcagcaaacagaatgtgtattgtggctgacgccattgtcatctttccaaacttgtttctgaaaggcatcacatggagaggggatgctgacagggatgacacagtcccagctccagaaacaccgtcagctgaacccagggttttttcatttttgtgttttctcatggaggtttaggggcttagtaaacccctttatgtgtattttttttctagggataaaccccatacctttcctcaaatcttcaaggtccatgacctcccgacatgtagaaccttatgctaataactgctcctgggagacctctcctcaggaactgacttgacccaccttcctaccaatgtggcaggaggaagtccctaaatgtgctcgagcctgtttgatccaacccctgtgggagtccgtgttcctctctccccactttgccctgtccttcccttgttcttctcttccttccctgtccttctttggctttgctacctctcttcccttcccattgtttttcctcccccctcctaggttctcacatcgctttcctgtttccctctcctgcaatatggatttgacatattaatcattacagcaactgctaaaattccactgtgcttcattaatccggaggaaaataccatgtcagctg

SEQ ID NO: 875 - DNA, 5267 bp, Homo Sapiens
ggttcacaattctaacaagaaaagattcatttacgtttctttgaatgactttcagcttacaaggttctttataattactattacagatgaggacagctctgtgccagagaatgagctgggatctgccctgacaagtggagcctcgtttgaaagtgtcggtaacaggctctgtgtctgaaccaaagtttcccttgcaacctggtgtggctgcatgatggagtttgggccgtgacatatggtgggtttgacgtgtgccactcttagggccaacttctaaagcctccaagacacagccccatgccctgtgcccttctgcagctcagagcagatgagcccagtgaccttgaggcccttgaagatggtggaaccaggagacatgaggggccttggcctggaaacacaactcgaagggaaatcactcatctggaaaacgtgtttggacccataccacaccgtggcaaatacctggtaaaactgtcatctgaaattgcttggaaataggacactaccacctaaacccacagctcgtaggccagggcacctcaactgtagtccccagaccagcagcatcggtgttacctggaaaattaaaaatgcaaagttttgggcccacttcagaccccaggtcagaaattgtgggttgcagaaatctgtgttttaataacccttcagatgactgtggtgcccgacaaagttgaaatgcctgctcccatgtgtgctgggtttagtttgtgctttagcaaagcgggataagaaagaaaggaggccaggatggaattcgctggtttccaactagaagtgacagaaaatagaaagagtccagtaatgtgaggtcttgaagtgttgggagaattcattcatcacttctagattccagacaatcagaaataaaattttaaaagtctttcaatgacaaactaagacttctcagttgggaaaaaaaaaaaaaaaggactcagtcttgttgcagacatgagatgaagagtgtggtcttttcacaaatgcctgtgcaagggagtcaaggacagaagccatccggtgggctccttggcacgggggcggctgaagcaaaccaaccaggagcccacgcagctgtcaagggcttgtgtcagcaagtaaagcctagactgcttgtgactgtgaagtgtaaaagtgcccctgggtcctcaggcctgtggacaggacaaagccaaagccgcccagcgccgtgtgatgcggccacagagaacacgagcctcgggagagaggagcctggggctggaaaacaagggtgaaggacgctcccctctggctgcaggagaggggctgctgagggcaagatccatcatttcttgggaccaatgatgctgcttcctactctctgctttctgcctgggagttttgtctgggacgcctgtgtctgccccactcactgtgtggtgcaagctccatttccagtgaggacaaccgtggctgccgagagcaccttacaagccaggcatcctcctctgagctcaaggcagccttgagaagtgggacgaagacttccttcacgggaagaggagcggctcagagaaaggaagaggctagtccagaaccaccacgtggacatcttctgtgaaggcaagggctcaccctcaccctgacgccagccacctgcccctcttaataggagggcgggccctccccgcacagcaggcacttcactgcaggctctgctgcctttgggaaatgtgcctcccttgtagagctctgtggtgcagattcggctatcaaaggagtagaacccccccctcccccccgccaccgtcccacccccacagagcagctaagaaagctgtttgatttaacccgtggtttcccaaatactttagaccactaattaattttgttttctgaaacattcgttaatatgttcacagaaaattgtggcattcactttggaaaatatatctgtttaagaacagataatgaatacataacaaatttagaactgtgttaagattccataactaaaaccactctaaactttctgaaatggctgaaaacgtttccctaacttttctgaaagtacttgctgggcttcttggagactgaatcatcccttttgagcccacttaggggaaagttcaaaagacctcagagaagacaaaaagcagggcaagagagacggcccagtcttctagctctccactggagaaaatgcatgtgggaaaggctgggggtttccatcctcaatatttagtaaaagataaagtaaaaattacaactgccttctgaatggctcccctcccctgacttcatgggagtgatgactcagccctctgttttgtaactgcggagattgaaagtggagacgggacctttggcatttcagaaaatgtcgacgccgctttcttctgctttctccgggacccctctggggcctcgcctcctcccctcccgctgaaagcctgctgtgaaaggagcaaggatgtgaaaaagatgtacgactctttgcttccttatgctcggcccaagtttatcaaaagctgtggagtttgctaaaataatccagggaattcgcctggaaatggtttttttttttttttttggttgttgtttgtcttcacttgttccaaagaagcaaaataagacaggggctgccccttgtcctgtctcattcatttttgacacccttgtttctccacacaggccctggggtgaagggcacaggtgggattcagaatagaaatgactcgagggacgcaaggagttgggatcagaagaagcagcagaaactcctgctctgcagacacagcagacattactgggaaagacaccagagacccaggagttcacccaagtcctctgcacactgtcttcccagccctctctcctggatctgagatgatttcacttaaaaacacaagcctttgcttaaagggagatataagtgacagccacctggtggtcaggagaacaaactgccgccgtgtctccacaccctgtgtgtcctgaacaccgctgggaagccgtcagcagacgctccgcaggccaccggggcgatcggggcactaaaggccaagcaggcttcacacactgccaaagtccaggtgaccagagagtatgaccggacacaaaggtgggacaagccgtttctcattgttactgagaagcaactgtgagtgaacaaagcttacagagagatccgagatcagatgggtacccatggcaggaggggaggcgtttatgagagtccccggtgggcacatattaaaaaaagctaagtagaaaaatcactgagaactcataactggtcaatgagttcaggtagacaatgagggagggtttggaggatggcgaaagatcaaaggggccctgatggagtgggaggttcagagggaggagacgctgccatgttcagcctccaggagccaccacaggttgtgcataggtgctgtgttgacttctgctgaggaaattcacaaaatatacttcccccagagaaggaggaatgtggagcaggcgttaaaaagcagcctgcactcaccttcggaggccctcggtgggatgtcctcttcccagccctttcctttctctccctcgggtgccttttcctgcctggtttccttggttattgtgtttggaatgcaactttgactagttgttgaatggtgaagtggcaaatggtaggtggattctggcttgccgcacccatcccacaggtggaggtcttgtgagaacgactccagcagcctccagacaaatgactgttgactaaagtgaaatgttatgcacatgaaatgcaagagatgactagacacgcactggatggaattccacagcaggtgggagacttgggaaagatccttgttttcgtaagaaaacacaatctcagctgggtgcggtggctcacgcctgtagtcctggcactttgggaggtcgaggtgggcagatcacctgaggccaggagtttgagaccagcctggataacatggtgaaaccccgtctctactaaaaaatatgaaaattagctgggcctggcggcacctgtggtcccacttactcgggagtctgaggcaggagaatcgcttgagcccgggaggcagaggttgcagtgagccaaggttgtgcctgtgcactccagcctgggcaacagcgtgagatcctgtctcaaaaaaaaaaaaaaaaaaaaaaaaagaagagaaagaaaaagaaaacacggtcttcaaatcccataacctgagcacaaaagactcttggctcgctgattcgtctcccacctcctcctccccgcacagggacagatactgaccgggtgtgagagtaaggccccgtgaagacgaaccttggggagctcactggggtccctacttggaattttaaagcaaaaccatgttgctggaagtgaaatcctcttcagatttacgaattatggggctccattggaggaaacaatccctatgggccaatgacctcgtttcatcccaaattatcctctggttttacaactggttagtttcttgtatttccaggatttataaattgcaagtttgcttgtgaagtggtagaatccatttttgaatttgtttcttaactattgatagggctagtaaaattcaaatgattgcataaaccttagaaactaaggtcagttcagtgaacattcttggtgctatttcaacaatccttgaaggtttaacacgtctgtgatattactgtgtgatttcgtgttatcactgtcttatgtgcattctaagcatgaaactgtgtccagtagctgtttttgaggaccctactaattatacagctgatggtagcatcagccgtttgttcaatgttaaattattttgtattttctaaacaactgacattttctcctagcaaactactgataggaaattgtatgtgccatgttttcttccaacagtcttgaatatgccactgcattcctgcctgggtaaaagagtgagaccctctctcaaaaaaaaactaaaatgaaaaggcccaggatgaaatagagtgtttcaaaacccacagctactccccatcctttttctatcccaagagctgtgcctcagggatgtaataaaataaacatacaaactttctaaaggctgattttacaatttttaattaaataaatactactcagaaccttttcatggggtataactcaagttgtttttcagtgtttgaagaagatcaggttcacatttaagtcagctaattattaattatcagcaaaggcataaaatacacctggtggttatttacttattctcttagctttacttacatctttc

SEQ ID NO: 876 - DNA, 9270 bp, Homo Sapiens
cttttctttaagaacaaaggttggagcccaagccttgcggcgcggtgcaggaaagtacacggcgtgtgttgagagaaaaaaaatacacacacgcaatgacccacgagaaagggaaaggggaaaacaccaactacccgggcgctgggctttttcgacttttcctttaaaaagaaaaaagtttttcaagctggtcgcacgttcgcaggcgcgggcttcctgtgcgcggccgagcccgggcccagcgccgcctgcagcctcgggaagggagcggatagcggagccccgagccgcccgcagagcaagcgcggggaaccaaggagacgctcctggcactgcagataacttgtctgcatttcaagaacaacctaccagagaccttacctgtcaccttggctctcccacccaatggagatggctctaatggtggcacaaaccaggaaggggaaatctgtggtttaaattctttatgcctcatcctctgagtgctgaaggcttgctgtaggctgtatgctgttaatgctaatcgtgataggggtttttgcctccaactgactcctacatattagcattaacagtgtatgatgcctgttactagcattcacatggaacaaattgctgccgtgggaggatgacaaagaagcatgagtcaccctgctggataaacttagacttcaggctttatcatttttcaatctgttaatcataatctggtcactgggatgttcaaccttaaactaagttttgaaagtaaggttatttaaaagatttatcagtagtatcctaaatgcaaacattttcatttaaatgtcaagcccatgtttgtttttatcattaacagaaaatatattcatgtcattcttaattgcaggttttggcttgttcattataatgttcataaacacctttgattcaactgttagaaatgtgggctaaacacaaatttctataatatttttgtagttaaaaattagaaggactactaacctccagttatatcatggattgtctggcaacgttttttaaaagatttagaaactggtactttcccccaggtaacgattttctgttcaggcaacttcagtttaaaattaatacttttatttgactcttaaagggaaactgaaaggctatgaagctgaatttttttaatgaaatatttttaacagttagcagggtaaataacatctgacagctaatgagatattttttccatacaagataaaaagatttaatcaaaaaatttcatatttgaaatgaagtcccaaatctaggttcaagttcaatagcttagccacataatacggttgtgcgagcagagaatctacctttccacttctaagcctgtttcttcctccatatggggataatactttacaaggttgttgtgaggcttagatgagatagagaattattccataagataatcaagtgctacattaatgttatagttagattaatccaagaactagtcaccctactttattagagaagagaaaagctaatgatttgatttgcagaatatttaaggtttggatttctatgcagtttttctaaataaccatcacttacaaatatgtaaccaaacgtaattgttagtatatttaatgtaaacttgttttaacaactcttctcaacattttgtccaggttattcactgtaaccaaataaatctcatgagtctttagttgatttaaaataatttttatggcccattttcttttgcaaagtacaaattataattccagaagctatctgccaaaaaaagacaatggaagaaaattatgaggacactaaagggaacattcctgactcctaggacacagtattctcatgtaagaatacccatttggctttgccccactttctgttcaagttgtatgtgctgccaagacaaatttcttctcctcactttctgttcaagttgtatgtgctgccaacacaaatttcttctcctaacacctggaatgagcttgtggctccacggagctcccatgtaggtagaacacattcaagagtgtttcttcaggccaggcacagtggctcacgcctataattccaacactttgggaggccaaggcgggtggttcacttgaggtcaggagttctacactaccctggccaacatagtgaaacctcgtctctactaaaaatacaaaaattagctaggcatggtggtgcgtgcctgtaatcccagatactcaggaggctggggcagaagaatcacttgaacccaggaggtggagttcacagtgaacgaagatcgtgccactgccctccagcctgggtgacagagtgagactccatctcaaaaaaaaaaaaaagtgtctgttcaattcattttatctgccactgtatatctacaagaggactccttgctttgagtcccagttcttcaaaatcctgcttgctgcctaaagacacaaagtcatagaacattaggactggaataaactattgtagtataaccttcctgctgttacaataaaaagctataaacattacaaaggcacttaaagaaaagctgtgctgggaaatgccttatttgaagagcatttgggtacactcacatgaagctttggaaagttacttaatcttcctctaagcctcaatttcttcatcaataaaatgatgaatatatttcatatttcataagatgtaggcttaaatgaaatcatgcatgtgaaaagcacaatgtctattatgcattaagtgttaaacacaaactttcaaacttttacatttcagtcatttaaatcaaatgatctaccatagcagatctccccaaagacactctagctccaaactaactataatcaatcccgtggtgacgacccaaagaaccagggttcctgggttttctctcacgcccagcccacctaggcttctgactgcctatctcctcatcttagagggattcctcctgaccagtcattacaaaaattcttggagcatgagcaagactgagtctgtgtttggattggaggaaggggtaagtaacaaggtatatatatgtatatgtgtgtgtgtgtgtgtgtgtgtgtgtgtgtgtgtgtgcgcgcgcgtttgtgtttaagttacaaactaaggatggttttaaaaaattgcaaaatgttaagagatttatctaggatctgacccacttccccagaaatttacggaattcaagaccaagcctttcgtattcactgtcatcagttagatggacccagtagctaaaaaattaaggagaaaaaaaatagaggaatatgagggaaaaagtcaagtcagaggactgaagaatatatacagaacatagaatattagaaattttctgaaaatagatgatagcaaatacctcaagaaagtgaggaaacgtgaaaagggagcttaaagaaaaataatagagtccatacatgggacacaagcacaaaaagctgactgagcatgtggttctctactaataataactggaaaacagtgaaaccagcaggaaaaacttgcacataagagtttaactttccactttgggtttcaaattctcccatagcaataagagtaagtgaaataatgttcacataaggattttttttttttctattactgtagtgttttgttttgttttgttttggttttggtttttggtggtttttttttttttgagacaaagtctcgctcttgtcccccagtctggagtgcaatgtcatgatcttggctcactgcaacctccgcctcccgggttcaagtgattctcctgcctcagcctcccaagtggctgggattacaggtgcgtaccaccacgcccagctaattttttgtattttaagcagagacggggtttcaccatgttggccaggctggtctcgaactcctgacctcaggtgatccatccatctcagcctcccaaagtgctgggattacaggtgtgagccaccgcacccggcctgttactgtagtgttttaacaaatctaagtgtaatagtattagtcttcattcatctaagacatacaagtactggaattttttaggtgggttcctcaaatgtcatcacagtggtgtcttctctacattcagtcactcttccgcccttctctgtaatgctcagggatttcccagttcactagcacttaacatagtatgtccttacttactttggggtataaatgactgcaatagaagaagtgatatccttgagggatgaaacacgatcttgcatattcatatccctttcaaatgtttactgacttaatcacaccattagttttctaagtccaagtctaaaaacagaaatgagtttaaatacagtgaacatttcattttcactataccactaagctgaaagaaatgatttttggtaaataaaagttcatcacagtgaaaagttctacatataactgaagatcaaaggattctcacctgggaagcttgtcaagatgcatgttcccaagctcccaggctcccactcccagagattctaatactgtaatggagctgaggacactacatttttaacaggctgaccaggtagttcagattcaggtggttcctaaaccaactctgaggaagtagtggttttatatacgatgctactgttgatgtggctactaggaatggtgctcagcagaaatcctgcaacatatggatctgtttacacactattcactgtgtaatgagagtctgcaacataggctaagtaataagagatgtcttgtggttgacctctctggagataagcagcaatgaaattccaatgaagtttcatcatctctcatcaccaaaaccatcctaaccacctcaataaaatacacctgacttcccccgctcccccgacccaccaccccaaaaccagctgccctatgttctaccaaaagctgcaaccaaccaatgacctgatactaaccccaatctatcagctgctgcctagtgcaacagagagggaaagtcaatgagaaggaattgggtgccagttcttgctttgcaaggagtgggttgactaatgagacagccacaaatgtcactgccatcccatctcaccctttcacctgtgctgcaaggcttcaacaatcatacccagtctccacttaggaaaattctgtcctttctcaaatgctggccactcagcaatgtgctcccttaatccaggccaagcacatagtaaaagaactccaaaaagggttacagccaaaagtgatctttctcctccatactcccaaagcagattatagctcctccataaacgtgcttcgcattgtgccccacgtttggtttgttacttgtgtatacattatcgtctcttctagattgagcttctgtaggaaaggagaatccttttcaattttttggtattacacccagctcaggaccttgctcagttgcttaaattgaatgagaaaatgtatctaagtacccactgatgttggaaattcaacttgttccaatattgaggactgcctatacctggcatatgcgtgtcccaatttgagaaattgtttttcaagttgacttgtatggattccttacagacgctcaagcatcagtttggttttccctaaatcctgcagatcaggaaggcagtatccatgtttgctttaagaaatttcattactataaatatatgaaatattataaatataaaaattcatatattataaatatatgaaattttgtctgcagaatttttttctcaacaggcaatcctgacataataaccaattttgagatgcttcaaaaataacactgcagtagtagccactcctaaaacaaaatatttcccctttccttcaatatatgtaatcacatatgacatataaaatctgcttattggataaatttatctttaaaagactatctatatttattaaaagttaaaatacatatactctttgacctggaatcaagtacaacaatgtattttacagagctaccagcacacgtgtggaattatatatgtacaaggctactaactgaagtattagtatagtaacaaaaattaaaaatcaaccataaatagggaataaataatggtacacctatgaatgaaatactaacttctaaaacacaaagtaaaaagaaagggaaaataaggaaaactggattaatccaacatatgacaggaaaggagaaaaaaataatgcaaagaaatgataatcacagtaaagtgaatacaaattaaaatttatctactaaaagacagtaattcaaagactagatttaaaaggaaaataagttttatgctatttacaaaagacagacttaaaacctaacaacataaaaatgctgaaagtaatataccaggtaaacactaaaaaaaaaaaaaaaaaaaaaaaaaactagtattaacaatagaacctgattttctaaaaaatagattaagaaaactagattaaaggagaaaatcattattaccgagatagagaggatcattacttaaatgataaaaagaagcaatttatcagcacgtttaaaaatcccaaaacagaatacacagtgctaacaaaatcatcttaaaataaaataagcaaatgctgatttagccataggagaaaccgccaaatccacaatcattttaggagaatgggtttaagaaaggaaaaaaaaaaaaaagatttctgtatgctcttaagagaaaatctaaaaaataatgacatgaaaaagttgaaaggaatggaaaaatatgtaccattaaaaggaaacccgacgtatgaatgccattatcagacaaaacagatttttttctttttgagatggagtctcactctgtggcccaggctggagtgcagtggcacaatctctgctcacagcaagctccgcctcccaggttcatgccattctcctgcctcagcctcccaagtagctgggactacaggcacccaccaccacaccaggctagtatttgtatttttagtagagacggggtttcatcgtgttagccaggatggtctcaatcttctgacctcgtgatctgcccacctcagcctcccaaagtgctgggattacaggcatgagccaccgcgcccagccagacaaaacagattttaagacaactaagaagttaacaagctgaccctacaataagcatgaaaattttgaaaaagaataggaaaggagaactcaccataagagaaattgaaacttgttataaagctatagttgttaaaacggtgttactacagtggtacatggacagataaatggaccaatgaagcagacccaggcactgaaaggaaccttttatatgacagcatggcacaatcagtaagaatagagaggaaataggccaggcacggtggctcacgcctgtaatcccagtactttgggaggccaaggcaggcagatcacctgaggtcaggagttcgagaccagcctggtcaacatggtgaaaccgcgtctctactaaaaatacaaaaattagctggtcgtggtggcaggcacctgtaatcccagctactcgggaggctgaggcaggagaatcacttgaacccggctagcggaggctgcagtgagccgagatcacgccattgcactccagcctaggcaacaagagtgaaactccatcacaaaaaaaaaagaaaaagagtagacaggaaataaatggtccagaataactgcctatccttgtggaggagagggtgattcaaaattaggtccctttcctcactctatatgcaaaaaacaaacttcaaataaattatacaattaaatgtgaaaatcaagactttaaaataaacaatgcagtaggctgctttataatatcaagttagggaaggctttcttaaatttcataaacataaatcatagaggaaaagatgaactgtctaccttaaaattaaagacgatataaacaaaattaaaaggtaagccagacaaaagaaatatttgtagtgacaacggtttaactttctttctttctttttttttttttgagacggaatctcactctgtcacccaggctggagtacactggtgcaatctcagctcactgcaacctccacctcccaggttcaagcgattcttgtgcctcagcctcccaagtagctgggatgacaggtacgcaccaccacacccagctaattttttgtatttttagcagagacggggtttcaccatgttggccaggctggtctcgaattcctgacctcaggtgatccatctgcctcagcctcccaaagtgctgggattacaggagtgagccactgcacctggcccacaagggtttcactttctaaaaatataaagaactggccaggtgcaatggctcacacttgtaatcctagcactttgggagggcaaggagagcagatcgctagaggccagaagctggagaacagcctggccaacatggtgaaaccccatctctactttaaaaatataaaaattagttgggtgtggtggcacttgcctataatcccagctacttggctactcaggaggccgaggcaggggaatcgcttgaatccagtaggcagaggctacagtgagccaagatcatgccactgcactacagcttgggcaacagagtgagacttggtctcaaaaaaaaaaaaaattatatatatatatcttatatatatacactattatatatatacacacacacacacacacacacacacacacacacacacacaattaatatgagatgcccaaaaatccaattgtaaaaaggggcaaaggttgtaaactggtaattcataaaaacaaatgaagagatgcttattggtactatatgctcagtattaagcaaattaaatgagataggatcgtgcatattcaaccaacaaaatatctgaatgtctgaaaataataaatgttaatgagggagtggagaaaatgggaatgctcatactgctgatagagagtaaactggtacaactattgtggcagccaattaatatttagtaaagctgaagatgcatggtccactgtggtacaggccctggagatattatcaaatgtgtacacaaagaaacacgcacaaggatattttctgcgatactgtaatactcaaaagccaatgacatcctcagtggtcatcaataagaaaatgaattaatgatgggattaatcatataatgaaatactatatagcagttgaaatgaatgtactctttacatgtatcaacatgctatacataaaaaacaatgatgagcaataaaagcaaattgcaaaaggatatatattatgaaaccaattatgtttagttttaaaacacagagaatactatggattgtagtaaaaaaaaatataaaatcatgaagagtaaggacaggtacaaacaggatagtggttcttc

SEQ ID NO: 877 - DNA, 3446 bp, Homo Sapiens
ggtactccattgtctggtaaagttcatatgactgcattctttttgcaaggggggtggagggagagcggggaaggagggggtgtcagctcaactgtaaaagctgcacagattttttttctttctctctctctgcctctccatagattgtttctgtttcatgccctgtctcatttcgcatagctaaaaaagaatgctaattaagatcccttgtcttaacctgaaaaataatgactcggctgtaattagaaatctggtgagagtttaaaaattctggtaggggaccaaaaacatcagttacggtgcttaggaagaaaatgaagaattatttttctgaaatcaagatggatctgagaacgctgtctgggcttggtaccaagagctggtatttcacagcagcgaccgcctcacagacgagctgtgggaagcaggagggagactctctcttagggtgccactactatggagacacagctgggctgaacaagatttgcttcaaacgacaacaagagagacagaaagtatctggttcaaccgctgcccgagcaggcaggcaccagaagagctagcagccaatccggccatgctcgaagccagctctgcagctcagccaatcagtgacatcattgctttctttagcttgcccatggtgatgtgaagatgagaagaaatagcaaggcccaaccagttcttcatctggagacagttcaacgttctgcaaaccagatcttcaggaattttactgggataattatccaaataaattgcaagcattctatccaaatggagctctttctgagatgaagagaattctcaatgtcaagatttgaacaagaagagaatggaatacacaatatggacatccataaaaattcatcagagagcattttactactgagctgcaaaggtaaaaataaaaaacaaagagcaaataagatttactgtttttaaagaaaaacaacattcttttgactgtgttttgttataagaattaatttcatattctttatgagtgtaactgttgaaattttattgatggttttcatttgaaaatgtgtgctatgacctacctttgtgaaaaatttcttgtggtcaattgggcagtttgtgtcccattgaatatatgtctgtgtatccatacgcttaagataggtgcaatacggtttactagaaagctttataggaaaagaaaaaaattatattttcttatttgttgtaccatataaaaggaagtgaaatcaggaggaggggaataaggtcatgctttttcatcttttttacatgacctgataagacaatgaaaccaaaacatgctttcttatagttatggtaaaactaaacccaatgctgcctcttatttcacatttgcatttataaatatatgttgaaatatttttactacaactgaatgtatgattgttgattatttactatagtttttaataattatgaggacaatttaagaataaataatggtttaaaattatgtagaacacatgatctatataaaggctataaaacgtatttatttcaaaatatgcaaaatcactaagcaattagtatgtagtattattttacacaataaagatataattaggaaatgctaagtgattatagatgtgaaatgattaatgattgtacaacttatcattttgttgcagttgagtttacaatcttaaaaaaacgtgtatgtggctggctttatgtttactcgtttgtgtgtttgcttgttgtctggtggtttaaaacattttttagtaatattttatttttgcccaacctgttgaccagatgagagttgtatgtagccatgcattttaagtgtatcttttttgaacaataagtttaaatatattttatttaggaaagaagatatcctatgtcatgtaatacatctggagtataaatgttagtgtggagtattagtaatcatgccattatcgtgccatttagtttagttttatattaactcatccaaatattgtaaattttagcaccattccgactatagacacagatgtatatatttaaggctgataataacttcctgtattctctagctagtgaacaagatcttactgttttatgagaaagttataatgttaccaattccttgaaaccagtaactaaactagttttataaaaattaaaataagcacggtctaactcatacacaattaacttaatagttaatttggttttaattataggctcgtaatactacattcatgcctcacaattatataattcatacatgcatgtatggattcttttttcttttaaaactcaattagaatagtttaattccaaaatatttactattgaaacaaaagcagttcgtgaaaaatttttcaataaactactttttaaattctcatgcatataaatttgtatttagttttgaatatttatgaaggcctttaatggagaatatgcatccttagaactcagcatttaaaacatttatactaaaggatcaatattatttttgactcttaattgcatcagatatttacaacaaattctatattaatagggggcccatgcaagatgttgcccattggcataaacccgtagatccgatcttgtggtgaagtggaccgcacaagctcgcttctatgggtctgtgtcagtgtggtaatctgacaaaatgctatacacagtgccgttcaacaatagttcagtaaaatcctgttaaactccagttgattatatacttttgaagtcattatattttcctttgtttttaatgtttattttaatcattgtctgtcttacaaggcaggcttcaattctcaacaacttggaagcgtttatatcacacccattcaagttcgattccatgtacagtaaattgcataagaaagttgaacctttatagcagggtttggaccaggatctgaatagattctgttcagaaacttcagtgcatactgtagtgcttagtgtacctcttcaacttcagtaagaaaattaaagactaccattggatttatatgtttttattgagcctatttctcctgaaaaaatgaggctgaatgcaattgacttttactattaattgcgactagaactatggcaggttagatggtcagaagacattttacgtgacctatgctggaaacccaagtgtttaggttagtcctatgagaaacagttagcagcaaagtttactggtaaaatgttagaatattatatctatatccttgccaagcccttaggtgtatggctgccatatttggaggagctgactgaagatatgataaggagtttgaagcaacattggaagctgtgtgcatccgggttgaggtagtaggttgtatggtttagagttacaccctgggagttaactgtacaaccttctagctttccttggagcacacttgagccgtcgaggaattcttcatcactttaacctgattgagccaatttgtgtgcaagaaggtaat

SEQ ID NO: 878 - DNA, 4625 bp, Homo Sapiens
cctgtctcccggacgaggacctcaaccccttcccccgctcggggaccccggccacccgcagcccggccgcgctgcgcccagaaacccatgagtcttcctcagcagctgtcgaaacttgccggcggttgcttgctcacctttgctgtctccccttcagaaaaggctggaggggagggcgaggaaggcttggcgtggggacgcccgtcgagtctctcagtgaggaatgagaggccagcttctcctgcggggtatgaaggaggaactgtatctcctatatatattaagtttcatttataaagacatcagagagcacctgagaatgtttcaaggtcaccaaaagctttctgaaaatgcctttctgcaaagaaggtttccagagatagaagataactcaggaagcttagaagaggtcaacctgggaagacaggattctttctccccacccgtggctctgcaggaagcaataccctcccctctgggcaaggtcgaccctccaagtccagatgagaagagttccctctgtctgctctttcctctgcctgatgacccagaggctttgcagctgtgatcctggcagcccctggccacctcagggagctgcagaattcaaaccctggaaatggagctctgcttgcagctgcacctggggcctgacctgcttaggacaggcctgtctggacctaagagaaccccactgccacccactcagctactccctaacagactgcagagaccaagtctttttcatttctttatatccattgatttctcgagttattgaaactcaatatttactgagcacctacaatgtgccaggcactgtgataggcactgaagaaagggcaaaggacgagcagataaatttcctacttgcagggaacaccgtggtagtgagtaaaatgagacattgcaaataaacacataaatatataatatgtcaactggcaataattgatgcgaagaatgattaagcaaaacaaggaaatgcagagacagggaaggagcatctatctggtatgaagtagtcagagaaggcctctctggtcagatgacatttgggcagaacctggggcctgtctcagcaccacctgttccttcctcggccacttgctccctgcagccaccaaaggcccctgtggttttcccgcctgaggctcaccagccacaggcctagaatatctggcttctctccccacgtccaaactcagctgaaatgccaaactgcaggaccttgtttcctgagcaactgccaatggggctgaatgatgcaactcggaaaggaagaggatttcattccccctgaatggactttgcaccagtgggagacaggaaacaggagattggaggatactgggcagctgaactgcctcaccctttccccctgccccgtctggtgcacaatttctccacacagcctgctgtgtgtggccaagcctgtgcgccgactgagtgttatgggttgaactatgttcctcagaaagatatgtcgaagtcctaacccccagtaactgtgaatgtggctttatagtatttggaaacagggtctttgctgatgcaatcaagttaagatgaagtcattaagggggtaggggcctaatccaatctcttgtccttagaaggagaaagacagagacacatcaggggaagatggtgaggtgacaatggaggcagagattggagcaatttatctaaatgctaggcaacgccacagagagctgcaaacaccaaggctagaagaggcagggaaggagcctcccctacaggtttcagagggagcatggcctcaccatacctttacttcagacttctagcatccagaactgtgacacaacacatttctgttgttctgagtgacaacagtgtgtggtgtgttattacagctgctctagaaactaacatatcgagcagccagctgtgtgggattgtacctcccaagtaaccctctaagacttaacctttgcccagggctctgtctctagagaactgtgacaatgataggtagacctgaataaagcgaaggatgatatctgcagggatatttgaggacagggagtgctgacaagggaggagccagtgcaaaggccccgaggtggcagtatgcttggtgtgttggaggagcaggaaggtgaccagggtgtttggggagtgaataaggggaagagtgctcagaggagaagtcagaggaggggccaaagacatgttctctagggccagaaaggcctttggatcttttcgacattatcttcttgacatgtaatttatatagtagtaaaatgaacaaaatgggtgactattttgtgaattttttagatacataaaaccacgtgatcactatccagatcaaatgttgaacatttccatcaccccagagagttcactcctgctaccttccagtcaatacaacttaccaatcctgaggcaaccagtactctctcttttatcatcataaatttgttttaacctgttccttaatggcatataaatgaaactacatagcatgcttttgctcaaaatagtgcttgtgaggttcatccaggttgctgtatgtatacttcaattattattattgctgagtagtattccattgcctggatatatcacaaattatttatccattcttctgctgaatatttgagttatttgcagtttaggcctataataaatgaagccgctaggaacatttatgtgttcctcttattttggttgcatgcaatcatttctcttggtataaacctagcagtgtattttctgggtcaactggcttaggtttaggttaactgtattcgtttacaccattttatactcccgtcagcaatatatgagttccaggtattctgcatcctcaccaacacttggagcctttctggtaggtgtgtagtggcattgcattgtgctttcaatatgcatttttctgctgactaatgcactcctttttatatgcctattattcacatatctccttttatgaagtaggtattcaagtcttttattcacattttatgttttgttatggccacatctcacttccagaatctgtattggttatctatcgcgcattaaaaaagtactctaaagcttgacagctaaaaacaacaaacattcattctctcacacagtctctgcaggtcaggaacctgggtgcagcttcatggggtggttctggctcagggtctcaggttgcatttgagctgctgtctgaggttacagccctacctatcaaagctgaaccagagccagactccatgtctaaactcacttatgtgagcttcagtgtgagaaatgtatgaattttgtttgatgaaatattgaaaagcttaacaacttcctcctactctcattggcctcttggtgcccagtatctgagtctgaaaaatctcatctataggaatcaatggcagcaaagacagaaccaaggtcccacggctattggggaggttggcagatgagtgaggaaaaaggggtgtcagcaatctaaaaatattcaggctcacagaaatataactgtttgaaatgactcacttttattaagatcctgccatctcacttaccagcttaaaaaaaaatagatcacagcagaatgtttcaaattctccataaatggccatttgatccagcaacctacctgtggaaatttatgccaagattagaatctacaaaatacatacagagatgcacattgaagtattatttattaggaatctaaattgtggaatcattaaagagaatacatattccctcaaaagaataccatggtgttattaaaagtagtcattatgagtggttaggatataatataatattacaggaaattcttaggatataccatcaagtagaaaaacttttcttcccagcttttcaatgtgaaaatgtttaaacctacaggaaagttgtaaggccagaacaataaatgcttgtatagccttcatctagattctccaacagtgaccacagttgccacatctctttaagtgtaatgctcatcctttgagagtaagtgcagacattttgataccatgctctaagtactacaacacctatctaaaattgtagaaggaaactcttctatgattttcacactcaagacatttaacactgatataaagtttatattcaaatttctccaaaagatttaaaactatctctttggcttgtgttatccaggactcaatggaggattgagcattgcatttagttgttgtgcctctttagttttttttgatctaaaacaatccctcaaccatttttaaaaattctttcatgacattgacatttttaaaagactctggaacagtcattttacagaatatccttcaatttggatgtgtctgtttcctcaagattagaaattacatgaacttcttggctaacttctccattttattttgtgttcaaaatatattactctttcccatgtcctgtgaaaataaaaaatctctaatgtgtttgtgaaaaagattaagctaagattttgtttggatgcagtgtgatttggacttaggtgtgtgtatctgaacttcatcctttgtcatcaaaagaatagtataataactaagaacatgtagcttaagaaatccaggcacttgagagccactgtaagtaaactctaattcccacagcagaaagaa

SEQ ID NO: 879 - DNA, 5970 bp, Homo Sapiens
agtctgtactggcagcgaatcatacatagcttagtttatcagacaagctgcttttcttgagcaaagaaagaactaggagagaaacggggctttggaaccctgatgcggcaatgctgaaagaggagaaatatcccaaggaagggaaaggtgtgttgcagaacgatgaaaaataggcggcttctcacagctgttctcaggggacgagacggggtgggatgcagctccgccggtgcctaacactaagggccctcatcctgccgattcagttgtgtcgggaccgccagtgctgtctcctcgtcagatgctgcttctggtctccccgcagaagatgccactggagttgccttttcaaggatggggacatttgaaggccctggacgctcagctctgaggctggctgggatctcactagcaccccctggtggaggccggagccaggctgacgcgggaaagtggggcacggaagcgctgcggattggaccggcggcagctaggccgaaacgcctgtatttaaagggatagtaactcggactcgttctgcaatatccccacaagggcctgactgagcgagcgagcatggacggccgcggggctttctggacagtggccattcccagagccaggcaggaaggcctcgggaggctggggctcccgttcccggtgaagcggacgccgccagcgccccagaacccaggaggaagcacacaggccccacagagagtggttggcaagagtcactcggggattaggatgccggccaaatcgcggaatttgaggctggaatccaagcccaacaggactgctgtgtgtgaagcactcaagagggcccctacaaccaacctgccaggagtcggctcctgaaaacagggtcggaaaaggtcagtgcccatcagaatcgagctgtcggcaaaaagctggagaggttaggagctttgtctatctcaagggtaacaaactgctttgaccctgagggctctgaagacgactttccctcaccgcagctctcaagacaacagggatcagactcagaaagacactgcctgtataaggctcttgtttgtcttgtttttaattcctgccctctgcctccagatctcagtcctctatctgtgaaacggaattcggccttgcctgtccacgaaatgaagacaaggcatctcgtgtgtgttaagatgaaacaagatcttagcaagagagtaatgatttcttttttaaaacattttttactgtagtaaaatgtactataacgtaaaattaccatttcaatcatttgtaagttcagtggcattaagtacattcacattgtcgggcagctgtcagaggtgttcgaaccagagcgactccatcttgaacaggtgctgcgcaaaatgaggctgagacctgctgggctgcattcccaggaggttaggcattcttcgtcacaggatgagtcagtggctgccagggaggcaggttggttaccccaggaaccaatgaattgcatctcaggggaggttttgccagatacaggtcacaaagaccctgctgataaaacaagatgcggtaaagaagctggccaaaacctaccaaaaccagatggtgacaaaagcaacctctgctcgtcctcactgctcattatacactaattataatgtattagcatggcaaaagacactcccgctagtgccatggcagcttacaaatgccatgacaacatctacttagttaaatttgcatactatgaatatgagtatgcaaatacctgttggagtccccgctttcaaagctttggggtacacatccagaaacggaattgctggatcatagggtaaatctattttggaggaatagtcgtactgttttccacagtgactgtaccattttacattcccacaaaattatttctttctatctgccttcccccactagatagaacacagggaagttactttttcgtttctaaatccccagcaccaggaacagtgtctagttcataacagagctctatagagaactgtggggaaagaagtgcaatttatatgctgctgcctcttcatttggcatctcagtacgtggcacacagaaagtaggcactgaagaagggttgaaggacctaatgagtacataaatgaatgcagttaccattgctttttccttggtctagactgaggacagacatttttgtaaattaagctacttagttaaatgtagacctctggccagttttgctcatccagaagtttcactttaatgccacttcaaagatactgttttctgtaaatcagatcataattgtgatgagaatgatgtggggatgtgtcctggactctccccatcccccacctcacagcctaatgtataacgcacattttattcaggaccattttggatgtgtaggatctgctccagaacacaggataatgggcctcttttctggggatggtgtggttccatcattagatagcaggtgtgtcatctgcaggtactggtctcactattcaaccactggttgaaagattggttcaagatcaactctttgaaaaatcaaagtattacttttacaaatgcttttttgatatttctcaaccaattaaccttgaaaagttcaccatgaagttgaattgcctaaacttatacattgtatgggcactgagatgcaatttttagggctgtgtgggcatcagcgatgcctgttttcaatacattgtagctatgctcagtgtcatgggccttgtagggctgacctctttttgtccaagcattgaagccaatctaaaactcttttccaaaaagaaaatgttttctttgctaataagtcaccatcaactgcagcagaggcagctgtttgggcttcacaatttgcggaagcacatgccagcctggctctgttttgtgcttgttcacagtatatggctttggccttgttcagcatcagggagtagctgttccttgggtcatgcatggagttggatttaaccctggctttcagctggccagtcctcatcaggagcttgggcaggagaaatagtactctggtgaatggtctgaagacattagatcatagatgaccttggctgcaagcaactaaatccagaccacaacagtttatccaaatagggttaaccaaacaagtacaatgtgtacccaaatgatatcagtgtcccatgatccttccatcatccactggatgatttcttaattcaaagtcaaacaaaaacaaaagcagatttgaaacattctcatccatccttgaaactggatcacatgccatggtctcgctctttgaagtggtcaactgaacagctggatacatggtctggagctgggaggaggagtgccttagtccattcctgctgctatgacaaaatagcttagacttggtaatttataaataatagacatttatttctcattgttctggtggctgggaagtccaaggtcaaggtgccggcagattcagtgtctggtaagctctctgtgtccaggatgacaccttgttgctgcatcttctgaagaggacaaatgctgtgtcctcatatggcagaagagatgcagggcaaaagggccaagaagccctcttgagcctctttaatgagggcattaattccattcatgagggcagagccctcatgactttgggccttaacccaaaaggctccacctcttaataccagcacaatgaggtaagtttcaccatgaattttggagggacataaacattcaaaccgcggcaaagagtctggaccaggggatgactctgtgaagtgcgtgcttgtccactgccaaaagaaagggataagatgaggaatgcgaagctgagaaggggagggttcgagatcagcactgcattgagagaaaggggagttgggcagaggagtgtagtagcaatggtgggcatggcgatggctcaaatgaagaaggtgattgcagatttccctgttgcatgcttggctccagtggtgttcagagctcaaccacatgctcagtgagagtagagagttgagtttacccaggcctgtagttctgcatgacaactgcagtgaaaagggataggggagggtgctgagcatattggcaagagtgttttcagagtcatggggcctggaatgcaagctggatatggaggcaagtgaagagaggctggtgggttgggagatgcagactgagagaccttctgaggtaggagcatttggacgagcatgctgggaggacaagaagctgtggtcagaggtggatgttcaagttttggaaggtggaacagctaggggtgatgacaaggtgtagggtgtgaatttgagagtggacagttggggcagcatagcacagaaggtcactgaaggaggaaattgaggagcccagagcccagggtgggggatgggagttgtctatatgtgtgtctgttaggggtcgagtttggctgcatataacagacaacccaaatagcaacagcttaaaagagacaagagtatattttttttctgatatagcaaaaagtgcagaagtagacagctcaggtctggcatggtgactccaagatgtcatcagcaacccagagttcattgatctttttgcttcccaggggtctggcactcttcctcatgcttacgagatggctgctggaattccaggaatcacatgcaaattctagtcaggagcaaagaggaagagacacagtgaaaaggggtatacagcggcagaaggaagctcctcaaatgaactctgctagaactctagccagtagcttctccttctatcacagtggccagaactgtgacaagtgaccatccttaggggaaaaaagatgctgagaaatgtgaattttgttgccaccttacattttcaaaggagttccattcgtaagtacagaacgctcagagaagaggcagcagatctaggatatggagcagcagctcttaagggcacagtgggaaggtttcaagactgaggaggatcttggatttgggtaggggaaggcagttcacagtattgtggaggaaatgctgtgaaagagaaagtggaaggcatggaagcttaaacttttaatatgactggtgaatacaaggatgaagggcaaagggaattcagactcatggtggtcagattaagaccttcagcggctctgtctcccagccccacatacccacttccatgttctgctctttactgaagctgaaagtctgcaaccttcattctctgactcccttacattttcttaggcttcttgctagcttctgccaaaaagaggccctggcaggagattagatggcaggaggcagaggtaaggattccatgttaacaggtgctggaagttgctggtgtggcaatgagaactgggccccggtcaaggcagcactactttggtagatccagaatcaaccatgataaccgtgacagtgtcttcaacagtgcagcagtagacacaggcccctggtgctggaatccaatacagggacaggagcagcacggagtcacggaacaccgtcttgccttcatgtcactttaccatttcttctttctccctcttactctaccagctacctgtggagatgttgaaccttttatctgtcgctgtctgcttaggaacagaagaaaaggcagctgattgcttgactcagctttcagcttgatttttttcctttggcagagtgaattggggtcccaggtgttcattttccttttgtagtacctttcctcagcatgcaattaatacaaaaagaacaataaaccttaacaaagtttggcttgtattattccagactttcctcttggattttatgtacacttatctgaatccatgcagatcatgtcatgtgtgtctgtgtgtttatacacatttttttttcggtgtgcctcattctgcaacttgattttttaaaaaattcgataactgatcttggagatctgtccatgttgttacatatatgagatttttgtatttcctttaattaatggtgttcaagtagccgtttatgtaacgatgaacattcaggt

SEQ ID NO: 880 - DNA, 1805 bp, Homo Sapiens
agacccttgccatcagcagaggctgccgctgcgcgtcccctaggcgcggaagaggcggctggtggtccctgacggttttatacattacgaataaagctggcacgtttccatttctcctgggcaaatatttagaagaaaagttgctgggtaattggtggagacaaggtttcgccacattgactgggctggtctggaactcctgagctcaagcaaccggccctccttgacctcccaaagtgctaggattacagaagcactgagaccacagaggcaagagctggggaaggaaaactgcccatgagatgagatgtgcctctcagcttccaaaatcggggagggttgcaaagggatgacaccatccacaccagaactgcatgaatggcatcaggaatgatcagagaccataaattccagtgagaccaataacaccatttctggtcctgcatgctcttccaaactttgccactaaccccttcaagagatgccccccatggaatccagccatcatgctgtgaggaatccaagcagctacatagaaaggccacaactagatattccagctgtagtcagctgaagctccagccaacagccaacatcaaccaccacacgtgaaaacgagcaagccttcagatgattccgactcccaacctccaagccacctcagctgaagccaagtagagcagagactagctgtcccccaatgctctaatatgcagattcataattaaaaagaatgttattgttctaagccatgaagttttggggtggtttgtcatgcagcaactggaactgcctgatcacaccacacacacaaaagcagaaaacaatgccatttcaaaatggcattgggccacatggaatcctgcctcccagccaacccaactgcttctagctcagcacttcctatttcttttttcttttttcttttttttttttgagatggagtcttgctctgtcacccgggctggagtgcagtggcacaatatcggctcactgcaacctccgcctcctgggttcaagtgattctcccgcctcagcctcctgagtagctgggattacaggcatgcaccaccatgcctggctgatttttgtatttttaatagagacggggtttcaccctgttggtcaggatggtctcgaactcctgattttgtgatccacgcgccttggcctgccaaagtgctgggattacaggcgtgagccaccatgcccggcctcctatttctcaatcacaatcactacacaacttccttcagtagcattggtcactacctcttttctcagtatccaagttgaagaagagtgaatttatgacctctgcagcttgacaatatttacaaagaactctcttgagaagtgctttataaaccttgtcatttaatcctcatgcagctctataatttaatatattatttccattcaacagagcaagacacaaaaggtaaagaaagcaagtaagccaggtgcagtgactcatgcctgtaaccccagcactttgggaggccaaggtgggaggactgaggccaagagttcgcgatcagcctagacaacatagcaagatcctgtccctacaacaaaacattaaaaaattagccaggtgtggtagtgtgcatctgtagtcctagcttcttggaggttgagctacttgaacacctgagcccaggagtttgagactgcagtgagcctcatgattgtgccactgcactccagcctggacgacagagcaagactctgtctcaaaaaacaaaaaacaaagagggcaagtaatttgcctaaatttcagtaagtgtcagacttatattctc

SEQ ID NO: 881 - DNA, 1733 bp, Homo Sapiens
ggtcttaactgagtgaagttgtgtcagactcttgagccacagaaatgcaaggtcttacattttacgttgttttaagccactacgtttttggtaatttgttatgactgcctagaatcctaatataccaccaaaatgtgtggcaaaaataattattctattgacatttaagaaagggatgggaaggatacaatttttaggaaagagttctactgaagtgaaatttgaactagctttgaaggactccggaatatgaacagggtttaggaggaaatagtcattccttccaagcaaagttcacagagaagaatctgaggagaggcctctgactaaagcagaaggcttgtgtggggaaggagttggaatgaactctggattagaaatgtgttctggagggctttgcctacaacatgagaaatttgagctatcggaggaaattcttatttcagctcacccctatagagaagctatatgagtttatctgcttgctgcctaacatgcactgacatcattgcatcttgctgccttctcacacgcctcttcagcaacatcaaggacaacaaccaacaaaaagaattcacatttattgagtgatgactgaatactatgcactatactaggaactgtattcatgttatatactaaatcctcaaatcctgtttttaaatgaattcattgaggcttagagagattcagttaactcacattaggacacagaactaccagggacaaatccagtgttcaaatctagagcccagagtcccagctgttttatgcaaggccatctatgaacatcagatttgcatttcatttttcttgcctggagaatattttattcacgtgtgttttattaggcatctctagatacaataaagattatgcatgctgacatatgtataatcaactgttttaaaaatgaaactgaaaaatagatccagtcattcagaccagagagaggcttataatgaccacagcatgattcatccaaaaattgttaatacgttatggccaaaaactccagctggttacaaaaatgattcaaggatcaaatataaacctaagcaaatttgcatctgagtctaaaaaaacacctggcgtttatgcaactatagagactactatccccacagttttatctgtagtgaagtgcagctgggaccccagcgttgaataggttaatagaattgcttttgttttattccgttgaaatatctctctttgctcccatcattctccatagattgtcatgaccggaggtaaactgaacatctgaaaaggacctaattaacattgtgcgcaagtgaaagaataaatgaataaatgaataaaagaatgaatgagtacggatgctgagaactgagatgtggcatttccatactggcagaagctccgaaagaaacagtcatcacttcctgtcctactgcacgcaatgtgttaggcagtgctttgctgaaatccagaatataaagttaaactttatgagttaaaagtttgaacttttgagcgagatgtaattaagcacaaattagtttgtagaatcctaaatgtcagtgcatctaaacaaagtacatctatgtttatttgaaagcaaaaaacgatgacacatttttagagaattaaaataaactgatcattgaaattgaattaatttttaatggtaaaattaatttgagtgaagtagaaagaatgcggctcataatgttttattgatgatgcataaaaatgatcacaagtca

SEQ ID NO: 882 - DNA, 2603 bp, Homo Sapiens
gcccactcacacacatagagtagcatgttatggcacttacactaataaagccactgctatcaaagttctggacttgatttccagcagtattagctctgttttaccctcaagcttctgggttagtgggttattgctcaccaaagaagttctggttggaagaagaggtaagatatctccagagccgctgagaagaatgagtaaggtaaaactggtggcattcctgactgaatacccttcactcacaggaggcagtgtggaacagtgggaatgaggagtgctatgggactttgtatatctggtctggaagcctgtttctggtacgtacagctagggatttgtagaagacttcaggactccagatgactctgaaatacttagcaacagtagaagataactacataagaggagcttggaactttggctcaccatggggaagagcaccactgaaggctgactatatctgcactgaacttgatggagcaagaataaattttactctccactaacatctagggggttgtattttacagcaattgccaccatcatcaatatagctgatactgtgagacagaaggtaaagtctgaacaagtttatagcctcagtgcaagtagctgaagaacaaaaccactaactctgtgtgaagaaggatatcaaggttttttaaaaacaataaaaaatgatagtgttgtagacctagttacgcatcatataaaatcctcccatacctaccagcttatgtattcatcctgtctttgatcctggcccttgcctattttctaagggacagacgtaacgataactcagggacttcccaggtccagactactccccctgctctaccaccaacagaagtttggcaccctcatgcgatgcattggctgacaaggaaagacttaccttcacatggtcatgctggacccacgggtatctgcttctctctacccagaggggccaaattacacatcctctatgtgaaatgtgaatgagtcaatgctccatggggcacacttataccaatgagaaaccaacgagaaacagaatatgagattttctctttctacaaaattttagaaataaaataagaaaaaaatagttcacctaaattaagcaaatattttcctataaagcacccacattttcttgcaataaatacattaacctggagaaatgtcactaacatgtcaaattaacttctcaattaataaaggccaattttgatgtatttctagcactttcaagctagaaataatgtgaatagttttaaactgaagtgttttacactttagttttacagttttacagttctggtaaatatttggcttctgtgcttttaagttactgttgtaactctgaagccatattttgatttaatcctgaaaggtttcagaaagaaatcatggactacaaaacttgtatagagtaactcttttgttttaagcaaataaatacaacgttaaaaaattctgcattggacaaaagtaaagcagtttagcttactcaaataaaacacagctgaatgatgatcagtgtattcttctatatgttattgtatcttcaacctcaccagacttttggctggtagtcccaacaatgtgtcctaaacttcatattacctgttttgatgttgattttcactgcaactgaccataaacacttcaagttagagactgttattgatattatttctctttttaattattaatgttatgtgaagtaacaagcatatagtagggaatcaataaggattagagaaattaacttaagaggaaaaatacacatctgaagctgaaataaaatactcagaagggaagtattacgggagatattttaaggacttgacatttcattgattaagatttctttttttcctcattgtgtagtatcaaagatctttcaaaaattacagggatatcaacatagaagaacatatttagaaacatcacataatgattccaaaatattgtctttacttttaagattttttagaaatctctctaacataaacttccttgggaatgggatcacttaaggataaggaactttggattgctgcagagccataaattacaaattccaaccagctgacagattgaactttgaaaataaagaaaaatgcaaacccacaagtttaaaatgtaaacatgttgcccaaaaccattaaaaagtcagtttgcatgatactctcaaggttgttttttaaaaagcctgtctgttaagtaaagacagtattgttcaccctttgaagctgattctcaagaaggggtgcccttctgctactctctatgaaaataaaaatgaaaataaaatataaggttttatttcctgcttagagttgtcctaggcctgtgctaatgctttctactgctttatttctaaaattttgtatatgaagctattgctacaggaaatcttttttttcttaagactttaatacctggtaatcacactactgtagaattacttctctataaggaccttatcagtaggatttagtaggcaattcaagaagataacaagccatgaaaagatttggaatttttctggctatgagataatcaatgatgttctataaaattctgggaattatatcattttggaacta

SEQ ID NO: 883 - DNA, 1866 bp, Homo Sapiens
cagtgatcgagtttcacctttgtaatgaaattcattgcaaaaggagaaaacaaatggaaaattatcaagttcagtgatttaatttgtactggacaaactttaggcccaaggaaggtaactgaattggccacatagctgatagtattcttcctgtcatgatgaaccatttgaacatagttgtggttctttaaactataatcttaaatgtacaatttttaaatttcatccacacttgctcataaatatggtgtgtatcttttatgatgattctttggaagtatatgataagtaaactaatggaaattcaagatactcatacagttttaacaattgtaaaatttcttgttaatcagtctggttatatgagatttgtgttgattctgaacattcattttgtagtaataggcttaaaacacaatggttcaggtgttcattagtttatgcatttgcatgtaagtaacagtagtaaatttttaaaaatgaaaatactttataaatcatactataagtgtcagtagtttaggcatagataggtactaagcttaaatattacatagataacaagtttaaatattacaataaaagaaaaagtgggttttcaaatggatgcttgctacttgggatttcttttatgggtcattttgtgtgaaatgagacaatccatgtgcaatgcagcaaatttttttttgttgttgttgtttttgagacggagtctcgctctgtcacccaggctggagtgcagtggcgggatctcggctcactgcaagctccgcctcccgggttcacgccattctcctgcctcagcctcccaagtagctgggactacaggcgcccgccactacgcccggctaattttttgtatttttagtagagacggggtttcaccgttttagccgggatggtctcgatctcctgacctcgtgatccgcccgcctcggcctcccaaagtgctgggattacaggcgtgagccaccacgcccggccgcaaattttaaagatacagattaacataaaggatataaaataatactgccactgagaggtagcatcactgttaacatactgacatacattgttggtattgagctggatggggtgttgattatcctctcccaataccaatacccctaacacataacattgtggtacgagttgttattgatgaaagtatactttataagtgaataaaagtggcatactttttttctgtggacagcattgtctaatttttaaaccaaattaagaccatatttactgtttcctctgttttggtgatgaatatattttaccatttttttcttatggatttttaaagtgaaatggtaaatacctgattagtgttttaatgatttaatttgctgtctttttaagactgtttttcctcccctactttactgctcagcaccttaagaattcctgagctcattctggtttccttatgggctgtcattagatgcgtcttcttctattgttttcatatctttatttgagcatttatattttattcagtgatttctgcatattgtgaaattgtaaaaacatcatatttatcataggatctttgaaatctccagtgtttctctgtatactgtgtttttctatttccattataatcacataaggaacaaacttccagtttaactcccaaataaaagcctcattactgtataaaaaactttggaggcttaatttgctcttgtgcattcaagcaatatttcagataaatatgacaaatctattgttttttaaactgaggttatatcaggcttaagatttttttttttaatagagcaccgatggttgattgttgattggttttggttaggtttcctaaaggctgttaggattggttttaaaattagtact

SEQ ID NO: 884 - DNA, 4926 bp, Homo Sapiens
gagtaacttctctactcttttattaaaaatggctaacggactaaatgtcagttacataagaaagatttaggtttgtctgtgaaggtcatatctaccggtaccatgaaatactgagaaaccacgttgttactctttttatctttcatttgcttttaactacactgctttctttatgcggggcattttatataatgtacctaacatgccaacagaaattgtatgttcttcataaactccagaccaatgtgcttttgcagtgatagaagtgacctgtgaaatctgtgtcaacctcagagccagggtaagataccgtcatcacactgccagcctgcctgcttctctgggtccttgtggcaggggaaggagatgagacagggagtaggagagagactgactgctacaaagggacctgtgcagcttcactcttatagccactgtctgtgtggatctcttttgacaatcatcttttatcaagcaacataaaaatatcagtactattaagtatccataagaaggcaccaatcatgagtggatatttccatatataaaacctaggtttctttcctttcaatatgtgcattgagttcaattctcatctggaaacagggaatgaaagccgcttgtatggatagttgtcaggaagacatatacaggatataagttaaaagcacagacaagcatgttctgtgtttacagggggcaggaactctctcagcaagaagtcctggtacgacaagacagttaaaggcattccaggaatatactgttttcatttggctgtgagtcttcctagaaaatgtaaaagaaagttttccctgttaagataacacattttctctttatggtttcatgagggcagaaggaagctctcagctgttcttacataaagccttgtctgagaggtatgggatgcctgatattttttatgcttagatttatataacattatagctcttcttctctttgaagaggcaatatggttgaataagatcataaatttaaatttactattaaaaagtattaagtattatgtgtaatacacactgatttttctaaaatgcaagtctgatcttgtcatctctttctaccttaaaatttattataggtctcctattttttagaacattaaaatccaagcttcttatgggatgcaaagcacttggtggcctcatctcattgttcttctttgtacttgagcatcatagagttagttacttgtagctttgaattcgtattatttttccacacctctgtgacttggtgcataggctttaataagcctgaaatgtcttccctctcttcctatgtgattgattcctatttatcctcaacacaaaattcagatatcgcctgctgtcttgagtcttcactgacttaaaagcagttcttatgtaggacctctactcctgttcatatttatgatgttgcctttataatgctatattttgtctgtttcatcctgtgtgcctgtattttttctttttttatactgcataattcctgggatccagattcatatttccaaaaaaacatcattgtatttccagcattttacacagtccctggcatatggtagttgtttataactttttgttaaagatcttccattttgcaccttatgataattgttagataaaaatctaaaataatgcatcactagaaaatgtaacatagtaaataaacattgcatatgtgtgccttataatgccatgtagaaaagagtgtgctcaaaattccttattggataaagaagcaaaaggtcatcgtgacataagtctgatgcacgtaaattaaagagttatttgttcaacaaagaacagcaataacaaagtctcccaaaatctgatgtcaggattagctggtgaaaagattaagatgtgttttttttttctctcattgtcccaatacctctcaatggaaccaacaaatatctgctgcaatgtctgtttcttaaaaattacctgttgggcaccatgtacactattcaagttgatgggtagactaaaagcccagacttcaccactatacaattcattcatgtaaccaaaaaccgctagtatcacagaagctattgaaattttaaaaaaaattagcctgcttcttagccaatcactactgaagttctgcaacaggcctatcaaccaagacgtatgagataaattgctcattccacctactgtttctttgtcagggtactcgcaaagctatggacccaagtctttgagaagccctatcactaggaataaaggataagcatgaattaacagggacagaagtatacgagaaattttattttgaagcaagatttatactaccccacttctgtaagatctgaagtatcagcactatttgacttgctgcagaggaaatcagaactagtgtgaggacctgtaaacttatatcagcaacttggaccttgcctggccaaagctgttagagcagtatgttgagacacctggagctacagaaggagtcacgctcactaaaaagatgccaggacatactgagaaagctaaggcagaaatagcacaattgagtcaagtgctggattagggccagaaaatgaagaaaaatcacgctgagatataattggggaatagaaggatctttgaacaagcatcgggaatactaagtagtttttgagtggtgtgtagacaggtaatcttggaataaaatgttttgtaaataataaaaaacaccctctatttcctctatgggataaacattttcttcaaagagaagaaagtagagagcttatctgtgccaggaattctaaggcctcagtggagttactgcttggaatttctacccaatcccctggtagcaggcctcctggccaactccatggagcctgggttttcacaaagctggagccttacagaaagcacaaggtaagactgagaaatagaaggctgactttaagaaaaggagtacaatactctattgaaagttgtcatctagatgttcttctacctgagtgttttctggacaacatccttgttcatttggcagtcaagtctctcaagaacgcttagagggatgattgatgacctgggctggatcccaattctggaacaagatggcatatcctcgcttttctctgttcctcagtggccctctccaggttgcccaatgacagtaggtagcccaaggaagtaccttccacttccacagatgacaccagaacattgattgagcagtaagcccaacagcatgcgaaaaatgaagaaccattcaaccagaataacattgcaagagctcagaaaactaaactttcattggaactaaagccaataaaagtaggacagacctgacaagcagaacctaaacaggacaactgcctgctaaaacagaaggtgtaaataggatcaagtgtctcctaacataagaactaaaatgtccaggatgtaacagaaaatcattcatcaagaaccaggcaagctacaatctgaatgaggaaagacaatccactggtgccaataataacaagataaattagatgttggaatatctgacaaagattttaaagcagctgtcataaaacacaccaaaaatcaattacaaatcctcttaaaacaaataaaaatatagaaaatctgagcaaagaaataaaatgatggaaaatacttgggatagcttgcatagcaccatttccaggccaacttctatgaccctggctgcttttcaactaatcataactattagacatgttaggaacagttctggattggaataccccctgggacaaacaaggatatgtagtgactcttaagtttccttatctgtacttcaaatttcacccctcttccctcttttcctaattttcctcagtaaatttaactctttaggaaaggtcagtggttcactcagctcctggacatgattatagtattctaagaactaaaaataacatgtattcatgctctgttcagggactacccaacccgacctgacttgttgctgtcaaaattggcaggtacctacaatactgattggggtggggagggtacccttttgttaaaagttcctggttttactgtctctaagtctatacctagtttgaagatagatggttttagtgaggtcacatatactaatggaaacagagtagcagctgatgaccaagattgcctttagagtttagaaacactgccttgaattgggcttatcctaagccccaaattttagcctgcactagccaagttgattttattattagaacactttaagttcatatctgtcatgtagcaagcagtggaaagtaacagccagacacccaagaatgttatcaaggtctccaagcactggcaaaggcattatgcccagaaagatccttgcgatgagacattttcagccattcaaatgtagttacaactgaccaaggcaaaatggggaaataatagtacctgcttcatcaggttgttatgagtattacatgagacagcacattagttataatgatgatggtcatggtgatgacttttctggaaaccaaagaagggatgctattctgcagggcttagaagtagaggagcataaccccctaaaaacagtaagagaagctaagactaaaggggtgggttaagacagagcccataatgcccaaatgccaaaagagtggaaaaaaagcaacaaatccgtaagagaaagacaaaacagagggatacgcgctggatgtcaagtcaagaaagcagaaccagagggtgaaaacagcttaagatcaaatggactggtggctgaggggtctcaaacaatgtccttcaatgttgtcgctatctgaagctgacttttatgatgcaatgttaaggagtatgacctgccttataggcccaaaagtgggaaggcagttgagaggccatcacaacaaataattattcaaaaccagtttttgtattctagttttggtggtggaaagctgaaatgctt

SEQ ID NO: 885 - DNA, 2406 bp, Homo Sapiens
acagactagccaagtggctgagacgagtgtggggtgcgtgactctgcctgcgcgcgcgccagccccgcagctctcgccagagccttgggatcaagggagaaagagaaccggcagctggcctcggactctaagcggtgcgcagctccagcccgagcggatcggccctgaacccacaaaggactcctcgctccttcaagcctccaccacctcgcagccggggaggcaactggagcgaaaccagcgacagatgcagccatggacaagacaaggagagcttcgtccctcccgcccctcgggttccttcctgctggggtctgaccgcgtcttctgtgcgtgtgggatggaggcccggctcgctcgggctccgagctgtcccccggctccgctttcggagcagcccttgggcgctggagaggtttcccattgcggtctccaggtcatggccaaggaggagaagcaattagaatgggggaaagggtcccaagacaaaggagagggaagcattctgcaatcccatcctatttgagccccgcgcaggagctggactgtccgccgtggctgggggacaaggtctcagcccgaagctcatgaggtaccagacagtgcctgggcttcgccacctaactcacaatgggtcctgaaccgcccgggcagtccccggggtcgtagactggggaccgctgcacccctccccgcccgcaatgtcccttggagtccgcacctgaggtcccaggcaatcgccgctaacttgtagctctcggacacggacaggtgcggtccatgcctggtgccggtagacgcgcagaaattccacctgtgcgcgctgcccggcgcccctggggcccctcacggggtaagtagagactcatctgggagaggtgaaaattccccagaattattgacacacacggcggcacaccctttgcctccgtccgcctccagcatccgcatccctttctctatcttcctgcccattgccgtcctcgaggctgccctgagatacagaattgtcccaggctgagtccaccgacccgccagtccctggcgatgatgccaaggctcttgcatgtacggaaataccagcagggaggttcgccaggggcagagaggctggaggagaacagagaattggaggtaaacgcgtaaagccagcagaactgtcggtggacatttcacccaggccgccctcccgcgtctttaagtcagttcaccgccacagcacgtctgtgactgcggccacccagggctccaagtctgccagcccaggcgccgcgagccaagaagagcgcggcgcctcccactcctcaagctccggaatcccccacatcgactttctatttccctgtcttcttttcttttttgtttgttttgcttttcctgctcttttcttagcgctgggtggcagtgggtatgcggcagccgtgtgatttgcccatcccctagtacacgcagccagcgacacaagcacacagcgaccagtccccacgctgtgccacacaccctccagcggtccggcgcgcagcccctgctccacagcccgggacgcctgcagccaccgccagggtcatggccatggcccacgcagggctctgcgggtggagaggggaagtcagcctagactccagagagaaaccctggggcaacccgaaaggcctgaggaaaactggaattggggttaggcatgaggggagggagtctctggggaaaacgggccgggctgtgcggagccctgagggctcctgcggctgcagcgctgcaggccgcccgcgtctcgccccgccccgccgctgggcgtccccgccaggagcccacccgcgggcggcagcttttctccatgctgcccagggaagttcgatgcctggtgctgggatgcgccagcgcttctgttcgcttctggcaatcctggcgtctcccaatgagagggctctcaaaatgaagcttttaataaactccagagtaaggaactcgggattgtgcggcaaaggccgcgcattgcactttgtgagcaatcggtaaatatgcgcaaccatatgataggaaatatatgcattttcattgataagaaaaaaagagatgatggtatttttaaacagaagccacaaacaggcatacctgtgccattgttggggagctaataataaaggcactgatgatcacaggagtaagaacaattgacttggccaagagacaattttaagctgggaactgtattcggctgcagttcagaaagtggacttttgagacttgtcaaacgaatggaagaattttgtgccaacaatgtcccagctttgcaggcttggcagctgaggactcagaagtaacaaattaatgccaggtgaattattattgttactactattatcaaaatgtgttccagttgcagcaatacaatggataagcaacttc

SEQ ID NO: 886 - DNA, 7999 bp, Homo Sapiens
agtgacgccatcagccgtcgcctgagccgtggcgcgcgggtggccgaaaggcgaaagtgagatttcaagggccgggtctggggccccgcgggcgcgcagtgctgcggcgtgtggggagtacggggaggctggagaggagccggccccgggcagtgtgaggtgcggaagcgcggtccagacactttgctgacgggaggccggtccgccagatccgggaggtggggcctcgttctggactgctgtacgtagttttattcctggtcatttttttccaccgccaaatcgagagatagagctttggatcatgagagatggcgtcgtgttgggaaaagagccttctttacctgagtttaagctcggctcatagacatcctctacctgagtttacacgtgtgtaatatgaaggcagtcgattaggagatgtctaagatcattacttacacctcaagtttccaaggggaggaagacacgggaaggatgcgtggtctgtgccagactttgtagacgattcactgaatgaccctgatttagctcttccggccctcttcgattcagcttggaagcaagcataaatagtgattgttgtctgtatacttctctcggaaggaatgctgttatgggagttgtgggttcatttttaggtgtctgaagaagtttcaggacttttgaaatgatagtggagcccattgaactcagaattatccctttctggtctagtaggagtatagtggcatacggaaaatgaagcaaacatcaaagacagatgtactggcacaagattaaaagtatgtctcagctgacatagttgccattttaagactgcttagtttagctgaatatgcctggattttttttttttttagcattttttttctttttagcattggcataccatatgaaatgtgggcagttgccagtactctacagagtaccaaggcagaattggcaatgactaaatcaattcattcaaacaaaaattcatcatgtgcctactgtgcgcataatttgtggaatcaaagtctcttgtttccaggggctttacagtgtaataagtgctatagtaaatatatatacggagtggtaaccatctgcctattcctctcctacagtcgttgctgagttccagtgtagaacagagcactgcattgtgtatctcaccactactgatttagattttataatttcagctgcatccctccctcctactttgtatattcttcagcatctttttctccctttccacttgaatacttttcgcaatctttaaatcccagcccattttattatatgacttttaacttagacttcacaattttccaagtgctagaaatttcctgagattgccttttctccagtatcaacgaatgagagactccctgttcatatatgagataaactcttcatacatattctagttccaatacccctctttctcatgcatttattatcttttctgttgtcaaccttctacaaattctggttccttagctaattcttctgtagctttcaattatttccttcacaagcaaactttctttctttaaaaagtattctatactcaggaggctgaagcaggagaatcgcttgaacctgcgaggcggagtttgcagtgagctgagatcctgctactgcactctagcttgggcgacagagcgagactccatctcaaaaaaaaagtgtctacaatcagtgtcttttttgttttctgaaattgacttgtcagccctctgcagtctagtctctgtgtctatcgtgctgtgctaccaaaaatgctctctttaaagtaatctcattgtttggaagaaaatgagttttttgttctttaatataatagtgaaatgatgatcctgtttcactagtaggataaggttcaaaactattaaaatggacaaggcatgtaaagtcactttcttttatttttatctttttttccccccgttagaacctctggcagggactgactagcccatgaaacttatttcttcttcccgggcacacagctaaactaaatttcacagctttccttgtagttggttatagtcatgtgatgaacttctttttttgagacagagtttagctcttgttgctcaggctggaatgcaatggcacaatctcagctcaccgcaacctccgcctcccgtgttcaagcgattctcctgcctcagcctcccaagtagctgggattacaggcatgtgccatcacacccggctaattttgtatttttagtagagacacggtttctccatgttggtcaggctggtctcgaactcccgacctcaggtgattcccccacctcggctttcaaagtgctgggattacgggcgtgagccaccgagcctggccgtgattaacttctagccaattaaatatgaatggaaatgatgtgctcatttttagggttaatgaagtcctcctattctcccttactctttcttcgtcaacttgatgcctttgagcatggtgaccttcaaaactatgtattggagatgccaaagccagaaaagagaagaatgagtggctgaaacagtacttggaagacagccaccccaattagaaacacccctttttgcacttactgtaagagaaaaaattgagatttgagaatttatatgtataggagctagaatgaccatagctagtccagaaattggtacaagaagtggagtactgctaaaacaataacctaaaatatgttacatcagcttatttatgatgcagcaggtggtagagaatgtgatttggaggctagaaaaaggaggcccatgtttgcagtggcaaagtaattagtaaaactgtcacctgaaataattcaaaatcagatcacctatctgtttagattagctccagaggaaatgattgaaaagagcaaaagtaatactgtgttgaattttacattttacttttagtaaggttttactaaagagagaaactcaggaaatacttcacagaagtgagagtgtacaggaatatttctcaggaagggttggaaaagttgacttttataagacttctaataaaaaaaaaaaaaaaactagaagaggtcttgagtatagttacccttgagattaagtcctgcaacaaagatcaggaaaagggtttggtctttccattcaaagtcattattttagatggcttcaagatagctacgataaaggtctaaaggaactggcataggagcaaggcagcaaagcagtaaattaggcttgataattatgtaagaaagaactttgggtgtagttaccagaagcaaatcaatcagaagactacatttttagaggaattttattaatcatactaaatctggctcaaatatcattgttcgggtgttaaaacagagggtaactgtccaaccccaagcttgcataagtagaaaaatagagcataaaaccttaacagctccccagtacccacacaggatgtggccatggagaatgatggacaaaaaaagaacatttcagaagctcgtataaggagctgtactaaagactggacagggagtttctcctgaagactagaattggagtttcatcagaactttcttcagtttcaaggagatgggccgcaaaatgtttatgcagtatttcatcattattatacatgaatagtattgctcagtatcacattttttttctgaatgagagaatgtattatagttatctgtccctgagttaccactatatattgggtttgcagggatgggggtgacaataaagataatttgtctttttagttcttaggtcacatctgtacctaatgaagagaactgcacattttctgaaaatcctagactttgagcctgttccagtaactggttaaaactttagattgtctcctttgggacagggtatgttctgtgtgtggaaagacaggtaaaatacatgtttagtgatcagaatagtagattcttgcaaatgctaaattcttctggccacacagctatatttccatgcctctcttgcaattaggtatatgggttaggtgtgctgattaggttctaaccagtggaatgtgagaagtgatgcactcctattccagctctggcctatggaaacatcacatgagcaatccaatatatcccactccccatcaacttgaggcagatgagcaaatttgcactggaaactatgtgttaaagatggcaaagccgcaagataggactcctggtttcctgaatcttcacttggaggatacttgcttcccaattagagacacttgtgctagagtttcctgactcttcactgggaggatacttgcttgccaattagggacacttgtgctacagctcatacgcattcttttgtgttaggccactgagatttcagagcgtgccctaataaagacctgtccctctttctccagatgcaatcgttcattacctaattctaatttttataccacaggagtaggcccacaaatcaggctagccaaagtatcctatcattcagccatagtgattagttcaggaatgggcagattaacaaaactgaagttaatcagagatagtcttatcatttgggctagcactatcaagaaaaagacacctgcttctggaataagcaaaaaaaaaaaaaaaaaaaaacacaagctacatctggcctttggtcatcatgtcgagtgaacctgcctaagaatgaaatcttacagggaaacagaggcagtctcaatgatactgcagaaggggaagatatcccatgaattgagaaatatttcctgggtttctactcgattgaaattccaagaggtaagggatagatactgccaggaagacttgggaattcaaaagaggagctctctgagactagagtcacatcctgacacggctcttctccaatgtgctggagtcctcagcatctgctggtcttgattcactgatgggggcaaccagtgtccccttaagtgtccgggcagaaacatactgtaccttggttttagaaagtaggttggcaggcatctttcctcattcccatcaaggagttggtaccttccacagtgtaagttattttctctgttctagagctactacaaagtgctagggaaggaaaatctcctaaagcagtctgtcatcatgaaggccaaattatgtagcagaagagcttggaaaaagattaagacggtggtggggaggacctttgtcctggtggcttgaagccatagggaaagaggttcactaaatgccaacaaatgctaaaaaataaaaaaatagacaaaacagcgagccagtggcttgtgctctgctttccacctgaaagtttgcccaacataagcaattataatcaagtagaaattgaagcatatgtttaagcagagaggaccaggtaacattgataaccactgtcctcccagccactgccttaattaggctttcatgagttttcacccacattattgcaatagtcaatctccctgcctctgatcctattatactctactttatcctccacattgacacctgagttacttctctaccttgtaaaaacaatttatttctgagtacaaaaacactacatgttcattgtaaaatactaagaaaatacaaaaaagcacacataccagaacatgcaattctatcatctagagatatccactgttgacattttagtacaaacctttacacagttgttttctctgtgtatttttaaatgagaatgccactgttgtatttagcatgctttttaaaattttttatttatttttatttttcaatccaccagtaagatatcccggagcatgcttttttttttttttaaacttagtatatgtgagcattttctcatggaattaaatgccctctacaatattatatataattaatatatcaatttacttaagacaggtgttgcaaactggcagcctatagccaaatgtgatatatgaacatgctatatactttgtcattacagcatttcagagttgtttgacttttgaatgcctttatacaatgcatgctgtcttcaattctctacagtttccataaattcctattatgcccagtccttattcactcatgtcacctatctttttttgttgttgttactgtttcggtgtgggcttttaagaaatttttgacatttgagttgaaaacagcaatttagccagaataagcatggatgttcattcacttagtatttgttgcctacctgctacataccaggcactgggttaggtgagaaaatggttagcaaaacaaacacggttctttctatcttgaagcttatggtctagcatgagagacacacaaatgaaataactgctgcaagggaaacctgagctagaaacttttgttttgttttggggcttccctgaggaagtaatatgtgaacagagatctatagtaggaaataggccaaaaagcagagaagaatcttcctagccaaaggaatgtatatgcaaaaggcctaaaaaaggaggtatcaaactgtgccaaaagagctgaaacactgaaagtgagaatgtttgcaagatgaggctggagaagtaagtggaagacagatgattcagggcctgtggaccatgctaagggttttgagatacatgttgataaagaatctaccctagtcttcttttccttagggaaacatccttctctttttaatcactccttatatggcatgatttcgaaatccccttcaccctcttactacccttctctagcattaataattttcttagtccactgctctggaaccagagcccagtaaaaattagttaagctgaaggctggggatggcagtctagcacaaatagtaattaactactgggcacattagtagaacagagctgctacctaaataaatccatttaaagtcaactaaatgttatttgggtaatatgtccctcatgttaaatttgcccaaatatatatctcacctcttaaaattcgtttagtttgaaattaaaattagtattgtttttctgcatgtactcctaggttgggtaaagaagggaacaagggaatggggaaacgtagagattcctggataacagagaaagacagcttgagaataaaagtatgcaaaagataatctacaacaaaataatgcacttaactcttgttactaaacaaataagctacccacattttagttttctgttttgttttatgtttgtcagtttagcaatttttgtcactgtttggaagacttagagtggttattgcatagaacaactccttacacagagatttgcaagtttctgaattttgtactttcaaattgaaaatcaggagaaacattttcaaggttcatattcagaccaagttagtatattaacaactaataacaatattaaaagttagaacaattcctttcctctatctttctcaggacaaatcgagtttattagaaaactagggagtgatctggtgaaactggaaagaatccaaggagttccagggaaatctttcattcattcatttgtagattattccacaaatgtttattaagtatctatggtatttatacagcacctacagtactatttagggcactgggtatagcttacaaactgcttaactctgaatatcttttgtgcaaggaataagtagtataatagtcccttgaaatacaggaattcacctagagatcttctcagatcctcagatgtgcacgttttatatcatgtaacttaatccagaaaataaagcataagcaaactgatatttttacacagcaatgaattttgaaagcaggcagagcttctagtctcatataaggggcttagaacttgccactgcatcctaataacaagtaaaaagctgaacaaacaaaaatcaacaactcttcttaacttcatcagaaatgaggacacagggaaaactgctgccctcaaaattggagagacagataggaagatacaggaaatcataaccagagcagaaacctctgggaaccagtgctggggtaggaaaacctgaactgtaattgatgaaatgctgaaggctcactgtggacaagcctgagagtcaaaaactccagggaaacccagtcatagaggagccct

SEQ ID NO: 887 - DNA, 5082 bp, Homo Sapiens
gtcaagcgtgcggcggcggccgtggaagggaactccctccactagaatatgagctccttgtggtcaagactgggtcccctgttcccttccccccagtgccagcggagcaaaggtcagtcagcggcataagttgtacctgctgggagaactgtctgcttcctccgggtgacttttctggccaagaaggaatatgagtatgtgcctccctgagcactggcctggagcccactcaggaaacaccatctcttcataaatggttttgattgcaggcattgttccttctgctctctggatgatggaaattgcttcaggtcactgcactatcttccaacgtttttgtggttgccatgagctgttgtacagaccacagtttggggcctgagacaagctgggcatggtgttgcatgcctataatctcagctactttggagggtgaggcaggagaatagcttgggcccaggaggtctaggctgcagtgagccatgatcataccactgcacttctgtctgcgtgacagagaccctgtatcttacataaaaccccagcccatatttgtaccacatctagatacgaggtcagagttcagatgcctaaatattgtagcttgtgttttgtccactgttgggggaagagtgaagagatttgacataccataatgttgattagcttgtgatggtttggcggcagcttaggccagagcataaagtaaaaaggaaaagtgttcacagacaatgaaaactgggaccaagtggtgaatactcaaggcacacagaccaggcaaggatcccagtggccgtggatgagtctcaggctggctctgggccagtggaacacacctcagtgtgggtgaaggcctagccagggtagcagagggcagggctacagaacagcagcccaggtggctgtggccgacctgacattctcctgtgaaaatcaggtgcccaaccagcactaatctagatagatggcagcattttttttctttaaagacaggatcttgctatgttgctcaggctggtcttgaactcctgacctcaaaggatcctcccctcttcagcttcccaaagcactggggttacagatgtgagccagcacgcccagccgaatcacagtatcttagacagatgccatggctgcccatagggtcctctcaaggtgcctctgcccttggactggcttcctacaccaacctgacaggtgcagcaaaggtggactttctggtaaggctggaggaggaagcctggtctgcgatggcctgagacgccctctatgggggttgttgagtggatggaaatgtgcagggcatgggtcctgcccccaagaatgcaggctggttccgctgggcacctgcagagggctgatgtccttttcctgaggcctgctcctgtgccttctaaccctagggtgagaagatgggctgtgttcacctcatgcccaggcccttcgaggagtgtgcccttgggggtcagagccctcctgtggctggtatttctttggatcatcacaggtgctccagacatcctttagggagtctcaggcttggtgaagggatccattaaatgttgcttagttggtttttgtttgttttttgttttttcgagacagagtctccctctgttgcccaggctggagtgtggtggcgtgatcttggctcactgcaacctccacctcccaggttcaagcgattctcctgcaacctctgcctcccaggttcaagcgattctcctgccttggcctcctgagtagctgggattataagcgtgtaccaccaaccctggatgatttttgtatttttagtagaggcagggtttcaccatgtttgtcaggctggtctcgaactcctgacctcgtgatcctcctgcctcggcctcccaaagtgctgggattacaggcgtgagccatcatgcccagccaactggtttgtgattaaatgttttgattgatgcagtttttgaaatgtactgtgtgtacaatattactcttttgagacagggtctcactctgtcacctaggctggagcacagtggtgcagtcatggcccactgcagcctctgccttgtagcctcaagtgatcctcctgcttcagcctcctgagtagctgggactacagttgtgcaccaccatgcccacctaatttttatttttttaaagatggggtctcctgtgttgcccaggctggttttgaactgctgagctcaagtgatctgcttctggccagctactactcttaaaagtagagttctcagagcaaaacagctccctttcaaccttcagtccggtcgaaggtgtggtgggggtaacaacagcaggctcatggatacctgggcagtgctccgaggtccctcctgtgttcccactgagcagcagcctgctgtgcccggagtggaggtgagaaatccagcagcagcgcggtggtgagtgtgggccctgcggagtgtggcaggcgctcattatggtgcagggcagtgttgggcacagagaaggttctcagaaaccacagtaacccatggttagttggtcacatcccagaccctgacctagcactggctggcactgtgacttgtcactctcctgaatggaagaagtgtccacctgggggtggctgaggaggtggatgctaggggactgctgggagccacggacctgtggaggttgggagaggagactgcaggcgcaggctgctggaggcgaggaggcctctctggagcgccaggccatacaaacaggtcccaggtggggccacgaggatcaggttagacttgggacccgagagacacgtcatgcccactgtgcaggtgccacctcatgttatcctgcaccaggggaggggccagcccaaagtcctggctgctggcagcatgcccgtacagcttggcacctgggtctgagttcacatgtctagcaaagctgggaaaatccaggagcaagaaggtgaagccctttggctcagcccaagctcagaaggcccttgcccgatgagccgaactgctgacaacaccctggcactgggcttggggactcccctggagcatgtaagaagtgaactgggagcgtgggagaaactgtctggcaggggctgctgcctcggagctcatcctccctggctgtgctggtgtctgtccagtgggattagcctccatcctgtggtttcaccaccccaccgcctctctcccccacagcacaggcagaagcagcaacgcaacacgagaccacctcgcttggggctagtagcagttctgggaaaggctcggtagggtctttgctccctgcggaatcaagggctgggggctgacccaggctttctctatagctgcttccagatctgggtctggaccagcttctgcaggaaggcaccattctgttggggtgtctgacacggtcagctctaggctcagcctctgcggcccccacaaaggcctagcaaggatggggcaaggtggcagtggtgcccgcacgcactgccctggcacaggtgtgtagttagtgacctgaagcatgagggcatctccctgcccaccccagctggagataagccccttgcggggcccaccctgctgataaaccccagagcagtatggcctgtgtcagaatgaccagtaggagggccccggggtagcagctgcccagcccagctgcgtgtgtgtgtgaagtattttcctcaacaccttataccacagaaggcagattttgaaactcgcatcaggccagaaaaagaatttctgaatggacacttctaaggggtgcctggttactcatctgcctcttccccctgcagggtagaggggcatgggtttgaagttcccgggggctcttggagactgcagacacggacgagctggggttcctggatgctgcagcagttggggcccctggctgagcgcacctgccccaggaggccctgcgtggttcccccagtagccccttcacaccacaccgcagtgaggatgccctgtctcctgccgatcccatcacaccaagccttttcgctgttgggctcctggcactgcccgatcctggagggcacttggctgcggctgtggctgtgaagggctggtgctctaggcgcctccgtggcccccgttgcctgggcacctacttcctgcctcagccacagctgcatccacgtgcgccaggggccacaaggccgaccctggcttgggcctgttcctccctgggtttccttgggatccagtcattggagggcccgcgcacagctgggccaactcgacacctccaagcccggccagggaatcaagcagctctccctctggcagcatgagctacacaagccaggcccgtcttcccattcccttagcaaggaggggcaaccccagccaaggccttctgcactgttctagactgttgctgcctagggctactgtagctgggagtcacattcctttctccccagatagttgcaaggggcccagcagccacagcacttcaagggggccctgcccttcccctcccaccaccccaccagggtccccatcttcccctttgtctcctaaagcccgtgaggcagtagaggagccaggccctcccctgccacaccctggagaagccaagcagcagacacccccagctccttcaggggcatttatttcccggtcagaaaagaagcagggacaggcgcctctgcctgagcctggcagacacaacacgaagaccggggatggggcgggggaggcacaggagacggctctcagcaatgtgtgcacttggtcccttgtttgttcctggctgggtcagggaaggcctgccgggggtggtggcactgagagcctgggggaacaggcgccaggccagtggcccagggacggcacggacggaggcaataaatactgatggccaggcggggctcctggctggccaggcactggtgggctggggagcagcagcagcacaccccacgtgtccctgggtcactgggttcgccaccggggaagggacggggaggccacatgctcatgcagacacagggagttagaggctagtgaggccccacggtacactccacatgttaaggcatcatggttagacgggaccgacagcgacaagggggctggccagggagcagcg

SEQ ID NO: 888 - DNA, 3591 bp, Homo Sapiens
agtctggtcttgtggggtttaggggctggaaatggggaagagctagagcacagcatttaggattgagttttatactattcggtactccaattatgaaaacaacgatgatgatgcttctgacctgccctgttgggctgtttcttccccatccttttggagaaatttggatacagagacagatgcacacagagggaagatgatgggaagggacacggggagaagatggtcatccccatgccaaggaaggaggcctggaacaaattccccttcacagcactcagaagaaaccagccctgctgacacttcgagttcagacttttagcttccagaactgtgagactatacggttttgttgtttaagacccccggtttgtagtactttgttacagcagtcctagccaatgaatacaggtaactttgggctacttcatgatggcccagatgtctctgatcctgtagtgtggtgccctagcctggtcaacgcttggagttttataaccctccatagcttcagtttcttcatctataaaataatcatggagcgtctactaggtcttgcaattaatctggtaaaacctttttcttcaacaaacaccaataaagaggatcaaaaatagcttgcttttttttcaggctggagagtggcacatatccactgttttatctagggttagttcccaggaatatctcctgttctctgttacaatgaagtccaaagggccttgatcatattgacattccggagagcatcattcagttcctcatattgattgaacttaataagtgggaagtggcaagtagtttggacactgtagtaaaaatacatgtataccagagggagggagctacatcccaaggagattcagatactctccacattggtctagtttttgggtccaacagtctgagtcatgctgagaaatcccatccaaggtaaaggacaagttgtactttgcttctcctaccactaagaacaggcacagcactaaataggcttccttggattctggaggcagcatataccatacttgggactaattctcaacacatttattgagtgactcagaatgcttccagctttcagtgggaccagagcaagagaatctgcagcagattcaggctgtgatgcagtgaaaagtgttctgtcattcaggacatatgactcatcagatcagtagtgctaaagatagctatggcagatacaaattctgtgtggagtctctgccaaggttcaacagaagagtcacatcacagacccaagggttctggagtaaggccatgccatctatggcagagagatagttaccatttgcaaagcagcatctggtgtagttctgggccttagcagaggtgaagtacctgagcatgggacataaaattacagatcatgagatgggtattatcagattcaccacttcatgagatcaggcaatccattgtacaatagaaatggtacatttagacttggatccaagcagacccaaaaggtacaaataagtttacatgaatagattacacagaccttcatgttacctagctctattgcacagattcctcgacctcagttctcacctatgacctcatggagattcccctgcaatcaactgacagaggaaagaaaaatctccagcctggcatagagatggatatctgagtaagtacagctatcacatttcagaaatactcagaggtagtcccaaaggacagtgcaaaaggaaaatcctcccagtcagcaagactttcagcagtgtaattggtcattcagtttaaataaagcaaaaaacagcttgaggtacagacatacacagaacctagagaagtgaaaaatggcttggctggctagtagggatcctgggaagagaaagattgaaagaccagataaaagaaagtttgcgaaagagtcatggaaatgggagcaacacacctgtatctttgaagaggaggcactgaacaggtaggcaggatgagttgtcctatggatctaagccagcatctcctctcagccacctcagtacttgggcaatgggcccatgagtggccattgttgtagggatggtgctatcaatgagcccaagattatggcattcctcttgttatggttcttccagccactggcattcatgaatgcccttcctgacagctacagagactgacactaggcacttgctatggcactattattgtaatgaaaccagccagccacaaggtagcatttattattgatcacgtgattactatattactagaaggggaggtttggatcataatcttgcaagacacagtctggaacgctgtaatcccaaatgttgaaatcacgaaaaatcaaaatccctaaagtctaaaatccctgatgcctaaaattctgaagatcacaatcacagaatagttgcatcatgttagaactattaccttgttgttgtctttatttggaaattaagtacggcttaagaagatgtctatgggtgccaagttaacaaggggcagatttgtgggcttcattttaggtgtcaacttgactggattggaaaatacagagaaacctggtaaagcattatttcgggtgttgctgttcaatcaccagtattgtttgcaccaaatttgtgacctgtatatgaatgcatgcagtatggacttccaagtacccaaaacaacacagaagcatgacacagaatattggacaatttaatagggaacgttcatgtcggtgactcatagaaaaagttcagagccatgccacgtagaaaatgaatatgaatgtattctccaagaagagccatatccaaaaagaaaaatagcagctattcatcatgatgcaagatttcaacatatagttgatgatcgtgaaagttagctaggtcttatgaatgatcgccatgcaaatgcccataatctattcctgtaatatactttttcatatgttaaattttctttttatgttgtttcttttcttttttagctttttttcactactttaaattgtgaacattattttttacaattttttatgctatgtgtttcatcttcgcgtcatttctgatatgggaggtagacattgtgtagagattttttgagagttctaatttgtcttacgcattattacaaacttgacctcataaaagttcattatcacaactttgtgtgtgagcattatgtgtatacataaaaacattgaaactttctcaataaattaagggaccttcttttcgtacatctgcatttgtgaaagatgaaatttctcgaaacctcagctctttgggtaaccccatatgcagtggtgacccatggcgatttttgattgatcttgtcaaaagacttaggttgttcatcacagtacttcagatgaccacaattataaagctgagtgcacacaattaccaaccatagtgacatttgtttatacatttccctttttgacctatttctttaccatacagtttacctactcatacctgttatatctgtgtgactgtcattagcatacctgagtatttatgcttgcaaaaatatgtgtgttattattgtccattttattgcttaaagtggcccatgaaatgttcagatgtgtttttatgtgtttcttaaataaatccc

SEQ ID NO: 889 - DNA, 3616 bp, Homo Sapiens
ctgtagaacttctcatcctccgtaactgcatgagccaattctataataaatctcctaatgtatctctatatatatcctattgggtctgtttctctggagaactctaataatatactacctaatcaaattgttgcgaggattaaataaaatgatatatgtcatagtgccaaataacaagccctcaacaaatggccattatctttattactagtgggatttagatcatgtgcttcttactaaaataataaataatatttattgtttgtttcagctatgaaaagaaaacatttggaagatcactgattccttcatggagaggctggcttgggaatagatgacgtgtcaaagattgacatcaaccttgagtgcttatttgtggacttgagatacagataaaaaaaaaaaaaaaaaaacctccctagagtgagggctacttgggatacatgctatatcccaaggagttctcagtttgaggtcagccccagctctacaactcaccaggagagtgcgcgaggatgagggagagacagcctgctctggttctcttcaaggtgacaatgacacctgttgacagatgagaattccagccaggaatacagatttaggaatcatgtttctcactctcatgatgacatagaagagatgcgtctgaatctttctgccagtgtgttaaagttattctgatattgactgtagttctgagctttgtctctatcccaccaaaccactaacttctggaaattacttgtagaccaagatgggaggactccgtgtgtggctccgtgagtatgtctgttacttctcctcttatataattttgaagatagctatttttctctcttggcagatatgaatgacttatcgtgcctgtccagagtcagggaaaggagaaacaatcttatttgagaagggaggatatcactgcagtggttgtgaaatcgtgtttggaagctagattgctctagaccactaaggtatgatttcacagaaattcccaagatccctgcaggggaaataacaaaggtcctgggtggcatggcaacaatagagatgacagaattgggaataatatcaggctaaacctgtcctgggaggcagggaggaaaagcagcagcaagtacaacatttgggacagagagcttgagcttgaacagaatgtaccggtgctgttgggtggcagccaggcccaacaatttagcattgggctttctctcttcatgtgacaaagaaacttcctaaaatactaaaagctaaaggagattgttatctaagcttgagatggaaggttgccagcggaaacttggaggatcacagccagtcgcctgggattgaccacagggagtggcagaggcagaaagcaaaagaccagttgcaattatccaggtaaaagatggaggctgttgcaataatccagtcctttttagaatcctgaattgagcctgtgttcccagttcctagaaaccctcaaggttattggtttcctcctcgcttaatagaccagtggaagaaatctacctccagttctatcttcacatgagcaactgtttacagtttacaatattactctgaaaatcagttcttttcaagttttatctaacacccaccagaagaaacagaagattatgaaaatggaatttgtcaaagttcctctcccaacaatatgatatttaattttgctaacatttttttttgaacacttactatattgcagacaatggtctaagtaaagcattttatgtgcatcctatcatgtcatcatcacacagccctgtgaggtagatactattattattaaccacatttcacattcaaaaaaactgaggcttagagagactaagtaaattgtccaaggtcacacagccatgaagtggcagagctgtggttaaaacctatgtctgtctgatgtttaagattttgctgttagcattactttgaaatgacaatatgagggcattttatgtattttttttgccccaatatgatctgcagaaactatgtattttaagtactacatttcttttatttaccaaattattgtcagataagaaaccgaaataaaagtttacagggtctaggattcctccataatgaatgaactttggggtatttcagtgacaaattggctttaacgcgatcaaattccatcctacaatgaaagtgtgttagtttgtggtttcaagtttaaaaacagcactgtattgtcttccagaaatatataaatagaaattcaagaagtatttcaatgaatacagataaaattagttttgttagaacatcaaatatgtgggtttcatttcttagctcagtttagaaactgtaatttcaattttttttagcagctgtggtaaattttgagatttgaaatttcatataatataaatcctcatttattgagcatttaaattatatgcccaacaatttactgtgtacattacttcacttgttcttaactataactctacaaaatattattgtccttgatttatagatgaagatattgagactcagttaagtaacttgcttgaaattcaaaaacgttaactgtggaaggcagtatttgaacccagtgttcaaaaccccatgctctttttattatatgaccttatttcctattcagtcttcagaagatatattgtcttattagattattctcgttctctaaataagtgaccttgggcaactatctttttccctggtattttcccctgcctttaaaacaatgtgatcaaactggaagtttttcacgatctctcttagccctaaagctccttggttctgtaattccaccaatagcccatttcaaaaataattctacagtaatcagtgggactcctgtttttcccatcttttttttttttgaaacagaaaattgaaacttttaaattagtttagtaaatacatctactagtttttttcttttatagtcatggttatattatttggtccttcttagttgcaacatgtttccttgctgtcaatttataatacctctcatcaacaatagcctgaagaaatagatttgaattgctttccctaatttatagctggaaaactaggctacgctggtatcttaaattgactttcctgaggtcacgggcactcagtgccaagaggagttggtacctacgcatttgaaatttctggatttctggtcttactctgtacttagtcactcttttctttcatttggccctatggtgggcaaactacagcctacaggccaattccagcctaccatctgtttttgtatggtccatgaactaagaatggttatcacattttaaaatggtgggaaaaaaagactattttgtgacataaaaattatatgaaatccaaatttcagtgtctataaattttgttggaatatagttaccacactcattcttttatgcactgtttttggctggttttctgcctcaacagcagagttgagtaggtgcaaccaagactgtatggcctacaaagcctaaaagtttgttatagaaaagtttgctgaccaactctattggttgcttagtattgctaggcactctgcaagtcacagggaacacagcaaactagacacatgactgccttgggcttaagaagaggtttctaaacttttgaataaaaaaca

SEQ ID NO: 890 - DNA, 1605 bp, Homo Sapiens
gaaattgttattcccattttacaaaggaagaaactgaggctcaggggtttacataagttgcccaagatgatataactagtaaggacacagctaggagtaaaacccaggcctgcagaggtcctatagacataatctttgcattacacagagccctggccacagctacctcctagtcctaatgttctgcaagtcttgctttttaagctctgtttttgttttggttttggtttgttttttgggttttttttagacagagtcttgctctattgcccaggctggagtgcagtcattttactatcctcttttgttaagtgtctgttcaagtattttgcctgtttatctactgggctgcctgcctttttcttactgatttgtaagagacttttgtttttttaaaaaagtctggagaccagttctctggtggttttgtgttgtgaatatcttctttggtattcacgcacatctctttaaagctcacaacaactccgagaaataaatactttaatgtctatgaacagaacaatcttagagaagttgggtggcttgttcaaggtcactgagctagttagcacaagaggtgggaaatcaaactcagatctgctcagcttgaaagactggctcttaagcattcagccatactgggaacagaggtcatccatccctctctagcgctatatgggtcttcagccccttctcctgcacctgcttctctcttctctccttgtttccttgtgactttaacttacgacttccatttcctgccctctccttgtgtggcctttcttctgactccccagctccaaacattgccactcacttgggttctccttcaaactccatgaaggacatctcatcagctccatttggcactgccccttcatgggcaggctttcactccagaccacgttatggccacggctcaggtactttcccactccaatcagctgtggccagggtggcagaatcccatggtcagcctgcctttgatagagctgcgggtttataacataaaggggtattttatttaaaatataaagagctttcacaattcattaagagaaaggtgaacactctaaaagaaaggtaggcaatttacaaaaaaatgaaatacaaatcatcaataagcagagatacaactgaaacaagctggagatgaaattctctcctcagactgaaagatgaaaaagaatcatccatacagcacctatgaggccatgaggaaatgggaattctcatacaccctggcaaagtttggcaatttcaaaattgtaaatgtgcatccactttgacttggcaattccatttacagaaaagcatcctaaagaaataatcataggctgggcactgtggctcaaacctgtaatcccagcactttgggaggctgaggtaggtggattacctggggtcaggagttagaggctagcctggccaacatggtgaaaccctgtctctactaaaattacaaaaaaataaaaaataaaaaattagccagacgtggtggcaggcacttgtagtcccagctacttgggaggctgaggcaggggaacagcttgaacccaggaagcggaggttgcagtgagcctgggcaacagaacaagactccat

SEQ ID NO: 891 - DNA, 5756 bp, Homo Sapiens
agagtgtcctgcttcctccgagagcttagctggggagaagagctgggagcgactcgagctgaggacgtggaaggggtgagtgctaattcctcagggcccgcggggcccacccccgggcccacccccaatcctacccccgccaggcccttcccccgtgggcgccggcagctccaggcccagcccagggcgtccaacgcggagggggtgcaggagttctcctgggcctgacagcctcagccgtgcagaaacccggcctagggagggcatgcaaagaaggacgccagagaaaaaggtcgagacaagccccagaccccaggaagtgactgtttgggggaagggaggatttccttcccaaggaaaaggggacagatgaggaatgcacttcgcgtccacgccgccctggtcagggagccgcctagagtcccggcttcggcccagtctctcctgctccctcccttagcgtcccgcggtgcccgggcctcttggcgcctggcacccctcgtctcgggtactcacagagtccggggctgcccgtcgtcttccatcatgcccgctccggacactgcgctccaaccaggaggagcaggaggaggaggaggatgaacaaaatggccgccgccaccagccaggcaggaaacagggcagagcgcaggcgcgacccgccaggtcaccgctcaggccagccgcgacagcctgcaagggggacgaccgaggggagagaaaaaagggccgccgaggaaaccctgggacccgctcacgacggatcacgtcgtcgctgtgggcctctggccggccgaagcccagccagctccgggagagatcgggcaaaaagagaaacgtcgtgaagccgaagtctctgggaattgtggtcctggaaatgagagagggaagcacttctgcagaggacttctggaacctgtggttaagaggagccgccggcgcccacccgcgctgggacgtgaagaggagacttctgggtagtgtagtcatacgtgaggacgtgcgacgaccaggaagtcggcgggctgggaggtaaagggaagaataaaagcgacattgaaaggcggggagaccaagtggggaaaagcgctgtctgggaaagcgaactacaagtcccagagttcctcgcgccgggggctgtcctcggactgctccaggcattgtaaggctcttctgttggcccagtctgagctgctgctccgccttcgtccagcccgagagcggtttcttcaactgtggctcaggcagcactctccctccgcgtggtgtccgagccagcagggccgtccggccctcctgtgttcatcagaacggctggctcgcgttagtcaaccgccgcttcgcgcgacagtcagaagagaggctgtgctggcggggacccggaggggttggggtgttttggggactcgatttcccacaaataggtatttctagcctatttgttaaatacaagtaggtggcctgcttgtaaattgctttacaagtttcagaggtttccctatcaaatgtctcatcggatagtggggtaagaagaggagccctattataatgacttgcccaactccccccgtattcttggagttaaaagaaaaaaaaatccttgggcagagacgtgcacaaacataaagttgcgtttacagacatcagtcatgtgggctagaaacgcagttttgcatgaagataggggaagccatgttcatactagctctgcatccctgtagaatttgtcttctcaccccccacaacagttcctggtgtgcttttttcctcctctaagtaccttcaggagaaagtacttggtcttgtagcttagtgaagagtggcgatgaagaaagatctttcagcccattgccagaacttaactgccccggttagtaatggcttaagagttgcttctgccgacatgtactaagtgcatgtcgacctctgcaagtggcggtgcgtatgcgtgccactgaacattaatcttgaaagcagaatcaaccatgcagcaagcccttatgttgtccattttcaggggaggaaatttcaacctgaaagacttcatagagacacggcaaaggagttgagccccataagagtccgtaggaacaacaaaaggctcagacgccaggacccatggctaaaatgtatgggctggggatgcgggcgggagcggggggaagggaactaaagctagagaggaccttgtagaaccgtgttgtcaagaatctatttcatgctgaggaatttgagctttctcttccaggcagtgaggagccactcaaaggttttgtctatgtttttaattggacctaggtgtagaactggatttaattataatccaattcattaacccatgcctggcccgctgtgatagtttcctgttgatgctgtaacaaattactgcaaatttagatacttaaaacaacacgaatttattttcttacaattctggaagtcagaagtccaaaatcagttacactgggctaaaatcaaggtgtcggcagggctggttccttgccttttccagcttctagaggctgcctgcattccttggctcttggccccatcctccatcttcaagaaaagaagcatagtatcttctttcttctctgcctctgtacgtacatcgtgattctcctgccaccccttttcatttacgagaaccttttgtgattactttgggcgaagattatctcaagattcttaatcacatctgcaaagtcccttttagcataacattcccaaattctgggaattaggacatagaaatctttggtggaccattattcagtttaccgcacccacctttattactttagttttgattatagccacaaacccaccacactaaaaagttataatgacacgagtttatatctgtatctatgctatacctcctacacacaataacacacacccctgccttcgcttggggtaaccatctttctgaatcctgtctttactatttattgctttccttctacaaggttttattccacatgtacatagtcctaaaaatcatatgtatatacatgtatatttgagtttttttttaacttagtaaaaagaatatgcccactacaaactagaatggttaaaatgggcatgtttactggcagtgaaattattaaggttaaaatccaaaacactaacaccaccaagtgctggtgagtatgaaaagcaacaggaactatcattctttgctggtaggactgcaaaatgttatagcccctttggaggacagcttgtcagttccttacaaaactaaacataatgcctaggtacttacccaaatgagctgaaaacatgtttacataaaaacctgcacacaaatgtttacagcagctttgttcataatcatcccaaattggaagcaactaagatgtccttgatataagtgaatggataaactgtcgtacaaggtggtacatccatgcaaagaaatattgttcagtgatttttttaaaaagagctattgatatggtttggctctgtatccccacccaatctgatcttgaattgtactcccataattcccacgtgttgtgggagggacctggtgggagataatttgaatcctgggggcagtttcccccagactgttcttgtggtagtgaataagtctcacgagatctgatggttttatcaggggtttccgcttttgcatcatcctcattttctcttgctgccaccatgattctgaggccttcccagccatgtggaactctaagtccaattaaacctctttttcttcccagtctggggtatgtctttatcagcagtgtgaaaacagactaatacagctctcaagctacaaaaagacatggaggaatgttaaatgtacagcaccaagagaagcccagtggaaaaggctgtaaacgctacaactttaactatatgacactctggaaagggcaaaactcagtggttccctgggcatcagggaaggagagagggatgaataggtggaacacaggtcatttttactggtagtgaaattattcagtatgatactctcatagtggatacatgaccttatgcatttgtcaaaacccatagaactgtgccacacaaagtgagtcctaatgtaaactatggacttcagttaatcataatgtatcaatagttgttcctcagttgtacatttgttggaattgatgaaccaatattgatacattgtgattaactgaagtttatatatcaattatgaattgatatacttgttaacactaatataaaacagtaataacaggggaaactatgtttgtaatgggagagagggcacatgggaactctgtacttcatgcacaatttttctataaacctaatactgctctcaaaagtctattacaaaggaaaaaattatgtccttgtaatcttttgagactgcttttcacttaattaacacacataagattcagccatattttatggctatcattcattcagactattatatgatattccagtgtataaatatactacatttgtctgatttctcattaatggatatttgggttgcttccaggtttttatactgtgaataatgctgctatgaacattcttttttttttttttaacctttctttatttttatttttttttttgtttttgagatggagtcttgctctgtcatccatctagagtgcagtggtgcaatctcggctcactgcaacctccgcctcccgcattcaagcgattctcctgcctcagcctcctgagtagctgagactacaggtgcccgccaccactcctggctaatttttgtatttttagtaaagacgaggtttcaccatgttgcccagggtggtcttgaactcctgacctcaggtgatccacccgccttggcctcccaaagtgctgggattacaggtgtgagccaccacgcccagccagctatgaacattcttgtgtctcctgtgatagatgtggaagagcctttcacccctcagccattagaccaccagggagtgcaagagcttttctttgatctatttggatctatacctaaaagtgaaattgtcaggtaacagggtatatgaacactccattttggtgggtaacatcaaacctttttcccaaagtgaatacacaaatttgtactcccatcagcatcgtttaagagactctgtgagcggatccacattttcttcagtacttagttttgtagtctgacaatcaaagtattagctcaatgtggtcttaatttttacttaatcaataaagttgaacatctcctcatattctgttaaccataagtttcctcttctgaagcatgcccattgatatcttttgcctatttttctattatgttatatgtgcttttctcaattttttaggaatttttgatgctaattctttgttatatatgtatattacaaatatcttctcctagtttgtaacttgtccctctctttttaaaatgcttttgatgccaggcatggtggctcacacctgtaatcccagcagtttgggaggctgaggcaggtggatcacctgaggtcaggagttcgagaccagcctggccaatatggtgaaacctcgtctctacaaaaatgagccaggagtggtggcatgtgcctgtaatcccagctacttgggtggctgaggtaggagaatcgcttgaacctgggaggcagaggttgcagtgagccaacatcgctccactgcactccagcctgggcgacagagcaagactccatctcaaaataaataaaataaaatggttttgatgaacaaaagcttttaattttaaaatggtcaaatatctt

SEQ ID NO: 892 - DNA, 3273 bp, Homo Sapiens
aaaaaaaaaaaaaaaaaaaatcaaaatctatataattaagcattgttttttaaaaagtagtttaggaagatttgtaaagcttatgaaccattgtaaaaccttatttctaaggtctgtaagacagttttatatgtaataatgtgtccatttccaggaattccccaaatactcatacagccattgagcaccccaatccaaaattcagaatgcttcagataagaacatttttgagtgccgatgtgacactttaaaggaaatgttcattggagcattttgcatttcagatttttggattaggaaaactcaaccactgtatttctgcacatattccaaaatctgaaaaagtctgaaacctgagaaactctggtcccaagcattttggaaagggtatactcaatctgtattaacatagacttctaaattagtgaaaatttgcattgaattaaaatgtgaagtaaatatttttgtttaaatattgtttaaaatttagtcatttaaaaattttgtgatgtaacaaaatgttgaatgaaataatgcttctacaacttaaaattatttttcatagtgaacaaaactagttgaatacttctaaatattcatttttgttagtgcacattttatccagttttaggctttagggaattgtgaccctttttttttttttttttttttttttggagacggagtcttgctctctcgcccaggctggagtgtgtggcgcaatctcagctcactgcaacctctgattcctgggttcaagcaattctcatgtctcagcctccctaatagctaggattaccggtgcccgccaccacgcccagctaattttttaaatttttaatggagacagggtttcaccatgttggccaggctggtcttaaactcctgacctcaggtgatccacccaccttggcctcccaaagtgctgggattacaggcttaagccaccgtgcccggcacttttgtttttaaaataatatcttactttcatatgattctttcagactgtggtatggcattctgaagcaagtcttaacagagctaaaaatcacccttacccaattctctgcactgacatatgtacacaaagtaatattttattattctccttcataaatggtttctttaattgaacctttgagccttatactatttttaaatttccctttaaaaattgaattacagccaggcatggtggctcatgcctgtaatcccagaactttgggaggccatggcaggaggattgcttgaacccaggagttgtagaccagcctgggcaagatagcgagatcctgcctctgaaaaaatcataataatactttaatttagaaaataccctgaattagaagtgcttcattcctcatttgtgtacagctgttcctctatatacgaaggggattggtaccagaaccactgcataccaaattccacccatactcaagtctcacagtcttccctgcagaatccaagtatacaaaaagtaggcctatcatttatatgggttttgcatcctgacagtactgtattttcaatcctagtttgtttgggaaaaaaaaattgtttgtatgcctgggtacagtatcatacctgtaatcccagcactttggaaggctgaggcgggaggactgttttgtggccaggagttcaaaatcagcctggtcgacgtagtgagaccccatctctacaaaagaaaaattagctgggcatgtggcacctgcctgtggtcccagctactcaggaggctgtgaggcaggagaattgcttgagcctgggaggttgaggctgcagtgagccgcgatcacaccactgcatgccagcctgggcgacagagtgagaccctgtctcagaaaagaaaaaaaaagtaaaaattgcatgtaagttgacccgcactattcaaatttgtggtgttcaaggttcaactgtaatttcctagcagcattttgtgtgtttgagaatctcttgacactcttcaagtaaatccctaaattacaactttgacatcaaaaaagctagacattcctacatttttgcactacaatacataaaaactcccatgctgatcggttgtgggatcgtgcctgtgaataaccactgcactccagcctgggcaacatagtaagtaagaccttgtctcttaaaaaaaatacattctgaagaaagttctacttatgaatacattttatttataacaaactggtgaaaattttagaccaaaccatgtctttctgggttgtagtgattaaaaaatggttaagagaatgttccctatacaaggcatatgttattaaacatgaaatttaggattagttttctctttgaaaattcttttgatatgctgaggttacagtttggaggttacattagagaaagaatatagggaagatggcagtggtaaaacatttccctgctttacatttttatattggcagtatcttggtttcaacttttctattttcagcaagatatttgcaagtttttactttgaagatgtttggtttatagtagtccatgctatactaatgctgttgctgagataattaagttagatactaatatgaaaaagaatatttgtgtaaaatattttgaagttgtaattagtgtatatacaagttgttaatacttacgaaaaaaggaagcattcccacctgtaataattttgttaacactagactatcagtaaattatcaagaataaaaaccttggtttttctgtaatatttgccactgagcaatttttattaaaaaccaaacagaagtatttacacaagaacaagtgaaattacacaaaatgataatggggagaaatttctcatctggtgataaagggaaaaagataatgtaaaagcagattgctgctatttgcataataagcacttgttgaagaataaatgattaagttcaatatttttgctctattttatacctactcactttggtggaattagttctccatgtaaagtatctttttaatagtaagcaccatttaataatgaaacaactcatatgttttgtaatccttatggagaattacttcatgtgataattatagtctcttcatggaaaacagtaaaaatactcacgtttatgatgatgggcctaggtactaaattcctcattcaatctttttttaccaaatggtacttaataaaatcttttaccttataaaaatctattttcggccaggcgtgagacactgtgcccagcctgtcagagcttttgagtagaaatacggtatcagaaatgtgctttattttattttattagacaaagtctt

SEQ ID NO: 893 - DNA, 7113 bp, Homo Sapiens
gcacagctccagagagcttcgagggccaagtctgcagtttggttgcttcctcctgaaatcaacgtgggagtcttaaaagcacggggagaatagtctactcagcagggagcatttcgggatgatgcagccattcataggaagcatggagaggcttgaactggaccatgtggtgctggagaggccattgcactgactggcaagagaagacctgcttcaccgtggtccacacagtaatttccctggcttcactcaaggctaactgtcctccagcaaaacacccctcttttcctctcacagatgaagcagatgagtaaaactgaggctccgtaaggtactcatccgaaatcaggcagaagagttctggtggctggaagtctgaaatcaagttgttggcagtgccagctccttctgaagcctctagggcttctctgaaagaggtcaagaaagcccctgcctctcgcctctgcagatagccatccagtcccagaggaagcggctatttatgcagcaattatcattcaagcaaagccatctttattgcaaagaatggagacctctgtaatatagcacaggaataatgaatgcatctggtctgtgtggcagaggggctgtgactgaaagcacaccatcaggcaatgctgtagaagcgggaatctgatacaacctggtttaatgagaactggagatcatgatctcctggacagccagaactatgttttatttatctgtttgtggccagtttccagccctgggcctggccttgagcaagcccttgagttgaaatgatttaaatcagagatggcacagataataaaaacaggaatggatatggagatagaggatgagaatttgggtattaacttggttatttactaattggagggattgaggtaagttgcttcattctgagtctcacttctcaaatttgtacagtgatgaagtttgggattggagtatatgtggagaggaacctccaaaacctttaccgtgcttcaacattctaacttaagcttaaacgaaaaattgaatttttacctggaaagaaaaaaaatactgttcagaatcctgtgttaatagttgttggtattaataaacaagtaaataaagtaaatacatgcattaggttttatttaccctcctacagtggaagataatcatttgttagttcaagccctgaggcattaccttcgtgacagctggtgaggtacgtgtgtaaaattgaaacatttttatgaaaaatcctaacaaagcattgctgtgtgtgcctattattttaatgtgaactaacagccttattcgagcaatttgtcacatttgaaaatataaactggaccccttattcatgcattttctgaagatgctgctttggtgctgacatttgttggtgcccttggtcataggagtgtgtgtggacccattcatattctcttctgatttagatcagtgggcaagaaggtcttacacacagttacagatctttcatatgccctttgtgttctcaattatgtaggggattttgactggctagctgcaatcagtctgtgagaaagatgaaagaaaatgaccatgaccatcacacactggagtaattgggtgtcttccctgcctcctggtgatgaccaaggacggttcccatcaaaaacacctaaattcaaagaagtcagcagtctgctgaatggagtcccgggatcaggttacatcaaactccagcttccaacgtacatttcaaatatgaaacataaacaccgattgcaaatctgaagacattttcatttagccctaggccaggatttttaatttaaaaaaaataaacctgtcaaggtctgcaggaaaggctcttagatattctggccaatggtttatttaaaaatccaataatgcaatttccttagcagcaggaggcaagagaccttctctaagctgaatgtcccataactggatggtagccagattcccagtacgtgaaacagaagtccatgaaacagaaacacattcccagtacattaaacccctttataaaaggggtgctaccttgaaggcccaggacaggatattctgaatgccatttctccccagaataactatgtatattgggagcaagaagacctggtaatcgaatctcacttactatccatgtgaacttgaccattcacatggattatttatgtatttattttactattaatttatttttgatttttttactttaagtctggggatacatgtgcagaatgtgctggtttgttacctaggtatacatgggtcatggtggtttgctgcatctatcaacccgtcacctaggttttaagccccacttgcattagctgtttgccctgatgctccctctctcctcaccaccccccaacagtttctggaatgtgttgttgccctccctgtgtccatgtgttctcattcttcaacccccacttatgagtaagaacatgcagtgtttggttttctgtttttctgattgtttgctgaggatgatggcttccagcttcatccatgtccctgcaaaggacatgatctcatccctttttctggctgcatagaattccatggtgtatgtgtaccatattttcttatccagtctatcattgatggcatttggattggttccatgtctttgctattgtgaataatgctgcaataaacatatgtgtgcatgtatctttataatagaatgatttatattccttggggtgtatacccagtaatgaaatcactaggtcaaatggtatttctggttctagatccttgaggaatcaccacattgtcttccacaatggttgaactaatttacattctcaccaacaatgtaaaagtgttcctatttctccacagcctctccagaatctgttgtttcttgactttttaataatcaccattctgactgacatgagctggtatctcattgtggttttgatttacatttctctaataatcagtgatgttgagctttttaaaatatgtttgttggctgtgtaaatgttttcttttgagaagtgtctgttcatatcctttgcccactttttgatgaggttgtttgttttttttcttgtaaattcgttccttgtaaattctggatataacacctttgtccaaagggtagattgcaaaaatttcctcccattttgtaggttgcctattcgctctgcgatagtttcttttgctgtgcagaagctctttagtttaattagatcccatttgtcaattttagcttttgttgcaattgcttttggtgatttcgtcataaaatctttgcccatgcctatatcctaaatggtattacctaggttttcttctagggtttttatggttttgagatttacatttaagtctttactccatcttgagttaatttttgtataaggtgtaaggaaggggtccagttttagttttctgcatatggctagccagttttcccagcaccacttattaaatagggaatcttctccccattgcctgtttttgtcaggtttgttgaagatcaaatggttgtagatgtgtggtcttatttctgaggtctctattctgttccattggtctatatgtctgtttgataccagtgccatgctgttttggttattatagccttgtagtatagtttgaagtctggtagcatgatgccttcagcatcgttctttttgtttaggattgtcttggctatgtgggctcttttttggttccatatgaattttaaagtgttttttttttctaattctgtgaagggtgtcaatggtagtttgatgggaatagcattgaatttataaattacattgagcagtatcaccatttcacaatattgattgtttctatccatgagggtggaatgtttttccatttgtttgtgtcctcttttatttccttgagcagtgggttgtagttttccttgaagaggttcttcacatctcttgttagccatattcctaggtattttattctctttgtagcaattgtgaatgggagttcattcattcacatggattatttaaataaaaaacttaaattttaaaccccaaatttaaaatgtgtcatataactgctagcaatctcccaactttggttgcttatagaccaagagtagagaaagagtctatgtattgtctagccctgccctgttggtcagaactggcccagagaagcaccactgactatttggagcaatcaaacttcctctctctagaatttaaaatcactaaccagaaaaagggactcagccatgggcactgaagctataagagccaatgatctcaagggtcaaaacacattttggagtagctatgacggactatggttaatctaaagaaactggttcttagacaagagactagcacatatggatatgcagaagcaggaatgggaggctatgtaagcccaaagagcaagagagaggatgcagacatctgataatattctagttcctatgtggtctggaagttgagttcatgagagtttctgccttccattgtcttgaatttctctgagtaaaattttattcctggaaagcaactacaagagaatgtcataactttttatctgagcaaactttaggtatctcttgtcttaccaaataattgaattcacaaatacttattgaacatgctttatgaaacaggatctatgatgaaagctgatgaaaaagcaatgaacaagatgggtacattttctgatttcatagatctcgtattttaatgggaggataaaaagaccaaaataagataggaaaacaaaacccatatgtacataagtaagtacaggttgacacattaacaaataaaaaattaaaaacaaatgaaaagacaaaacatgttttcagttcaaagacttagtagtgttaagactgatctatagatcaagatttaaggcaatccttatcaaaatttcactggacttttttacagaaattgacaagctgatcttaaaatacatactgaaatgcaagtgactcagcatagcaaaacaatcttgaaagacaaaaaaaaaaatctagagaactcaatgttctaaattttaaaactgaacacaaactgacagtaatcaggcataaggatacaaatatagataaatggatagagagcccagaaataaaccatcatatttttggatagttgatgtttgacaaaggtgccaggacaattcagtaggggaaagcaatagttctttcaacaaatggtgctaagatgactgaatatctacattgaaaggaatgaagctgggcctcttcctctcgccatacacataaattaaccaaaatagatcatagccataatataagaactaaaaccacaaaactcttagaaaaaacataggaataaatctttgtgaccttagattagtcaataatttcttaaacacaacattaaaggcacaagtgacaaaataaattgtatttcatcaaaactaaaaccctttacgcttccaaggacaccatgaagaatgtgaagagacaatttgcagaatggagaaaatatttgcacatcatacatttgataagggatttgtatctggaatacataaggaacgcttacaattcaattattaaaagacaatccaatttaaaagtgggtgaaagatacaaatttacatttctccaatgaagatatacaaatggccaataagcacaagaaaagatgctcaacataattaaccattaaataaatgcaaattaaaaccaaaatgagatatcacttcacacactctaggatgtttatagttaaaaaagatagtaaatgctggcaaatatgtggagaaattgaaatcctcacacactgctgttggaaatgtacaatggtacagtcactttggaaaatagtctaaccgttcctcaaaatgatggagaaaatgaggagtgagttctaataggtatgggcttcctttgggggtgatgaaaatgttcttaaattgatcatggtaatggttgcacaaccctgtgcatatactaaaacccattaaattttgtacttaaattgggtgaattgtggaataatattgttaataatatctcaataaatataaatatatttcattaaaaataaaatataggggcaacgtttcttcccttgcaggaacattagcaaaattgagtccccggctatttgtttgaatttgtattattgttgtaaatcatcctaaatagttcttaaccaaccatggactcaaagtgtcatagctacttatatttgtgaaaaaatatattctttaaatggaagggaacatccctacacatgatatctaagagtgaagggacattcttaagtattgttatcaggaatttcagaacacaaagtgaaattttttgccatgcaaaaaattgctttaacgtatatttttttcaaaatcagataaagcattgaacttgatgatgatgatattaccgtatgttaactacttattatgtacccagtctgtgcaaagcactgcataagcattagtttctgtaatccttccaacaaccttcagacatttattttgtttcccttatttttgatggaatgattgaagctcagtcagatgggttagttaacttgtccagtatcacacagttcataggggcagtttgaaatttgaaagccaggaatggttgatttccaaatacattttactgttaatctctaattatgcttttcctttactagtacgtttgtgtttttagtttttctgtttttatattttaagcacataattatgtaactaattatgtgcttaaaagtataaaattaatgcaggtcctttgtagaaatcttgaaaaaatagaagtgtgccataggtgacactgggaataactggagtttgaaatggggaaataaaattgctgataaaattataatatgtgtttgtatttagtactattaaaggatgcttatgacaatgaaatgtacgttataaagcaattgaattgtattagctgtttacatacacagttgacctttcaactgtagggtcatgagtttgaaaagtgggtccacttttacgtggatttttttcagttaagtttacattgaatgtgcttgcctctcctgcttccccttccaactcctccacctgttccatctctgccaccactgagacagcaagaccaactccacctcttcctcctctgtagcttactta

SEQ ID NO: 894 - DNA, 1033 bp, Homo Sapiens
agataatggtgtcttgacagaaccagtctggccagagcccagaggatctcactcagatggtcaccaactcaggccctcttcaggaccaagtttggtctgaagcattatggttacctgggcagcaggacacacaaacaactcactgttgtactctcaactctgagaacacaactctagcccaagcccctgagaccgccgtccttagaaaggcctgcttggaaaactggactttggctgacatctaaaaacagctctcagagcgttcccagtcaactgttagccaataaaagtggctcacggtgcactagaaacttcgtgcaaataatatggcttatgctgaacacttgctttccttctggaagtctagactgacagaaggtacatatgtcaccccccccagtaaaaccctggggcactgagcatctactggactttcctggacataaacattgcacaaatattgctgcgttttttgttctggagaaagaaagcactctgtgtgaactcttatcgtagggagagagatacaaatgcctggatacagattcctccagagtccatctgtgtcttttccctttatgaacattgatatcataaatcttagtcatgaatacaaccatatgctaagccctctgagtcttctagcaaatctctgatgatagtggtgaccgtggggatcccaacacagatatagaaaaataaggatgttctttaaaggctacaaaagtacaaccctgtgagcatggggcgctggccctggctcatcctctacccttcagttccctcattccatgtcatgaacttgctgctctggagcatcaacctgtttgtaggcctcaggcacacaaaagtgtggctaaattcctatgccttagcttttgctgcccctctgcctggagcaactctctggccccaattcaaccttgtctttttcctgactaactcttcttcactatgttttagcttaaatgtcatctcctccagaaagccttcattaactccttcattcttgttaggtagtcccactctgtgc

SEQ ID NO: 895 - DNA, 7882 bp, Homo Sapiens
gcacacacgcacgcacacacactcgcacacacgcagaggcacgggagggaaagaagccgatgaataattttgctattttttaaaatactggccgccatcatcaagcagcgagcagcagcagaagcgttgaagggagaggaggcatcgggacaggcccctcttaggagaggatttatatctagttggaaaaaaaaagaaagaaaagaaaaagaagaaaaagaagaaaaaaattgtcaagcccccgaactgaaggttacgagcggcccgtcagcagcccacatgtaaccgaactgtcgtgtttcatggctttttgccactccagctgtcaatcaaagcccggaatgtcaaggtagtgaatgaatgatggttgatgatgatgaagaggaggaatctttcagacccgtttttttcttccagtaaaactccgcgaggggtttctgcttcttgaattttttcctcccccctccccccttttttagctttgcccccgcggtatctataatacgatcctctctctttaaagtattgttcaaagaaagcagtgagaaaaatcaagaaaaaaaaatgaatagtttgcaaaaattggacttcctccccccctttcctgaagaactccaagattaaaagtatccttatttgttgctgagttgctcgtcgacatttaagagaaggtgagtaaaaaagaaaagaagatgaaagagaaaagaaaaagttggtctccagaattttatttcaatcgacagttacgcgaattcagtttagccgggaccgggaggtttgagagtgcggcggggtggggaggggaaaaaaacaaaaacgctgcggagcgttttcgactttgcaaagctgttgatgttggtgggtccaagttcccggtgcagcgccgctggctgagaaatttgtactcagtttttactcttctaattattcttaaattcaatttaagaatttaagtttatcgtcgccaataggattattgttgttttaaatgtcttgttcaataagtgccagttacgtttctttttaaaagaaattcctcagtgtccttgataaacctttttttgtaaagatcaacttcatgcggaacctctgccttgcagggtttaaacattcaacattgctaccttctgtttctttttctgtttttatagtgatactgtaaagtgagttagcatctctatagctttcatttagaaaaacttaagtcgcatttttagaaaaatattccttcccttgcagtgtgagtaaaaacaactcagacagattgatgatttctatattttcttttctttctttatcttctttttctttttttcttttcttttctttttttttctttttttttgagacggagtctcgctttgtcgcccaggctggagtgcaatggcgcgatctcggctcactgcaacctccgcctcccgggttcaagcgattctcctgcctcagcctcttgagtagctgggattacaggggcgcgccaccacgcccggctaattttttgtgtctttaatagagacgggggtttcaccatattggccaggctggtctcgaactcctgacctcctgatccacccgccgcggcctctcaaagtgctcgaattacaggcgtgagccatcgcacccggccgatttctatgttttcaaacaattgtaagctaataatgagttgattatctggtgataatcttgggttttacaaaaaaagaaaagtttaaactttattttcatgtgtttttatcagatgcagaaggcatttttaaccttaacgcctttctctgtctctctctttcatattcttaacttcttttgcattttattgaatacattaaagcaaacaacaggaacaatatggttaggtgtaggagggagagagaaatatgacattttaagatattgtcaaaaagtcatatttaacttcaacgacttttagttaaaaaagtgtgagagtgttgaaagtgcattcctactggaggaaatctatgtctttttaaaatttgccagttgtctcaggggagaacccagaatttctttgaacgaaagagatcttactgatctagttgcatgtcacttatgaaactgttagtttaaaatagcagtcctagtgtagtggattacacatgaggagatcaagttggagtcgattcaaggtattggttcttggtcagtctgctgaattcaaaacactattacctttaatcagcaacttgcgggtgttttattaatagagctgaaaaaggctcatctaacatataagaatttcctggtttccctcatccccaattttccagtccaatagaagcgattccaaaggagtagggtacccgcacttactgatttccatcctggtggcattttgctaatgccccattgtcagcgttggcactcccacccaggcttccaggctcatctgctctcccatatttggggtgaaaggaaagtaggtggggcaggcccgggagacaggcacgaaatgggggtcgcaggaggtggcacacacctccgtcaacagtcagctccttctgcccaggctggaaatggttttaacaggcggtaaaatttcatcttgcggtgtcaaattggggtcattttggggttagagttctcagtgtccgagaggagctgtccagctgcgtggggactcattaactgcaaaagatctgtttcagtaaaaacaattcaaagacaatcagaaggctaaagaccctctacaaatcgcattttacaagtgccccagaacaaatatggatggtgaaacctatttcttcagaatcccaaatcagctacttagctctggagtgggggtgggggtactgcataaaaaagaggtgaaaaggaggggaccaagcgggtggggaccagtggaagggggaatcgggcctctcaaatttaagagtctgtttttaatcacctctttcttattgaagcagccccaagagttctgaaaactgctacttttctatttttcattttctttttttgagccaacatggaatgctattataggtaacatttaagatttaaaaggaataattgaattccactatagtcccttaatttgaagggcattggctttatggggagtgtttaatttgaaccaagaatttatgaacccagactctaggtgaatttgcccacactccttaaggagcttgtgtagctgtttctttttcttttccttgaaagttatagcttcttagcacagataacttcaaattcctcagaactgagaagtccaaagtgttaatctgtgtattaaaatcgccaggtttaaatcctttttgtcttcttacaacagttagaacaattgacgccttgctagagaagcaaataagtccaaccttaatcttatctgtaactttatttaatgttttgatttggaatattttggattaagcatatctttaaaaactctgtaaggttaatttttattccgggagggaagttctctttactgattttgaaaaaagacatgaattattactttgattttcaaaaattccttcaggtaaaaggaaaattcaggtttaaaatgagaagctagatatgtgaaatgccagagattttaggataaaaccaagtcaatacttaaaagtaaagtatcatttgaaagaaattttatttcttgcattactgaactgagcaagtaacagtgatcaaaaatatgttattctctctccatctctctctctctctggactccacttctgtcactaggtcttctctttccatccccagcacttttctttgggttctgaatgacacagtgattttttttttttgtagtctagttattttctccaagcgtctcagagtatttctaaattgttattcaaggagtttgatttcagccctgcagaaacagccctgagcccagcatcgctgggacaaaggcagaaggggctatcttctgttcaagacctgctggctgacagttggaatttttgatatatattttatttggcgtttccaataacgtgtttgtctttccctctccaccccttgcagccatctattacttttaaaacatcccttctccataaacatcggctcatccttgtgaactattcttgaccttcccagcagtgtaaccagcagctctgaaagttggcctagaaataattccactggcttccttacctgttaactttactcactcttcctagctgggatcaacagaaggaaggggacttttttgtttgcttttgttgttgttggtggtggtggtggtggtggtggtggtttttggttctttggtccttttcccacttaaactttctataatgatttattctccgcctcctcccattaataacgtttaagcaccccacactttattttttaaataaaatggagtaaaattattatacttttttcctttatgcccccttttcttttatttctcccaattttaggggcttcaccatctcatagaaaggacttcaataaatagccctctagcgctatctggcggggctccaaacacgacgtgcgcttgctctcactgtttcttcctccttcccgcgctctcttctttcctctctttcttcctctctcctgctttttctctcgtctcttccgctcgattgttttcctctttttttctgtcctcctgcggcctcttgtctagttcctacccctacttcagcgcaggcggcttggaaagccccggccagaggctagtaactctcgcaagtgggagatgctctggcgacggatctctcttttctgatccctcctcccccttacccagcgcggatcacacacatcctttgcctttgattagcatcttaaagttgcttagcgtgccgcttaagtcccagcgtctcagctggcggtggtttggagaggcttaaaactgcattcatgaagtttggaggaaagaaatcagacactggaattcagggctaggagcccagctcagttttaggtcagaaggccgagtctcagtgcgagattgaggaagggtcggggcttaacgggggaggtgggggtggcgggggggggaacagcacggcgcggcgcctagcctgcgagatggagtcggagtgggggtgcgagcggtcctccaccgcctctgcccgatccgtacctcacaatggactgctcgagtttgtatctaggcctgtccaggattgtttactccttcaattaatcagctttatctcttttccccctccccccacctccaccaaatctggagaggagtgggaaagaactggaaaactcacagggcaaagagagaaagccaacagtcatagtgcgggaggaggcacgcctgggatgcaatacccaacagtctcctccctgctttcctgcaatttgcaggtcattgtctttcttatttgtagctttttttttttttcttcagtagccggtaaacaatcgaacgccgggtagggaggtcagaggggatggggctgtgggagagattctactcaggctaggtgctttagatttggacctggctgtgtccctactttattaaaattctcatgtggcgcgcgctgtcttctctcttctctctctctctctctcacacacacacgcacatacacacacagcccgagagaaatttccaatctttgagcaaatctcttccatctagtccttgaaacagaggaaaggacatgggacctgaaggagagttatgattgaattttctaaaatttagttttgacattgcaaagtaaaagtgaggaccgtattcccaatacagacccagagggtggttatttcaggtgaggggacctcagcctgtgacgtctatgatcaaccagacaaagaccccttcctaaatctgaagtcccacccccacccgtggcaaacatggaatacaagggaggggaaggatggcacaatagtgggttctgttttccaagaactgccccccacctccattgcagaaggaaaaaaaagcacggttcgggtgtaattaattggggactgttattaggtcatcattagccaaggtacaaataatagcagcacatttttacttaaaattgaccagccccagagtgatagatcgatttggagtataaaaagatgtatcaaaacatcaatgtcgattatttgaaatattgtagtcgaattttttttattgcttcatcggttaagtgtctgaaaatgcagtgttcaaacatatatttatgttgtcaatactgtcagaactgtcagttttactatactggatttgtactatatttcaaatatgctaatttacataaaatgcccaccctaggattccccccctacacccaccccatctctggaaaatccgtgtcagtttcttcaaaggattcagcaatctttgcctaagctaaagtgtgcactacctcttttactcaattttccacatcggattacatgtctttttcaccatctctaactttcaaagagatccttcttcctttctccccaattctgcctactctaacctcttcttcaaaatagtactgaggcacttggaaagcttcgaatttaaatatccacatcccagctccaaatataccattggagtaaaaaaacggaaaaactggacttgagtgtacttggccgcactcgggtaaaccaggcttcaccaggtagacgttctcataccgtaagggtccatcatcaaattacctggcagattgaaatcttccagggaaaatgaatttggaaatgtaaacaccttttctttctttttacttaaaagcctcgatggtagaaaaagaaataatacttataaatgatcggcacgttttaactttaaaagcttttgaactcaagtgaaagacacacgttggaaacagaattgatagttttaattctacccattttcacctggcacatcagatcagtggcaatcatttattttatggggtgtggaggggaaagggatagaaagcggatagaaagctagaatccactgaagtccctgtcctaaaaatctcagagaaattaaagacttattgaaacacaaacattccatcgctccatactctccgtccagatgaattgaaacttataaatccacgctctccccaattttatgttttttatttattttttttcagggtttgataggaaagatacccaagtctgatagggaagacagggccacttctggactagctgtgaggatgtgttttcatttccataacactgaagcactttctgtaaaccttttgatgtacttaaataagtctatttggacatttaaagaagctacacatacaaacatagcttggctttttgccgtcaatcccagcattaaaaaaacattcataatctaactgagaagctctttcatacccatccttctttcaaataagtaaataaataaagaaatagaagtgcaaaccaaagaaagtttccagcgtgcatctgtacgtcttcgtgtgcgagtttataaacaacttccagtcggtacttgggtgttacctccctcctgccacacaccccaaggcagaggcatcgagggatcgcccccagagagctgtgtttacttagcttgttttaaaaaaaatctcgccgccatgtatgacaagtgttactgcaagaaattcatcagccttctacagatacttccagttttgctgtaatgatctgcagaagagaactgccatcactttctcacatcccaaggtgttgcaggaactcagagagaggggagagtggctgaaacgcttaattaccggaggcgaaggaggggcgcgcgggggaccgaaggagaggggagtgaagaaggaaggtcctttaccaggcttgtacctggagaaagctttgaatcgcttctctgctatatttggaaaaggtatgcttgctttttaaaaaaatgcctttagggcaaagtgatacccttgtgtaataattaactcagacaataaaaataattgga

SEQ ID NO: 896 - DNA, 2467 bp, Homo Sapiens
ataggggcctctgcagccatggtcatgccaccctgccctggacctgtgacttgccacccacttctaggggttccagtcttgccctcacctccttgccctcctgagctcggaccacagagaaaacctcctacatcccgtccctccgtggggcagcagacatggtactgaaatgtgccacgcattgtctcactatgaattcacgggattctcaaaccacccgagaggcagggtgtttgttcttgctactgccctgtaacagatgcggaaattgattctccgtgaggttgcagagtttaacacaggagattcacgtgcagaatctgggtgtcccaaacttgctgccccgcagtgtcactgcgtgatcatctcagctgctttaaatgccagtggtgggttactgcaccctccagtgtcgcttcttttactgacgggtaaactgaggcaaggagccttgaagtcacagatcaagagtcaagagtaagaggcagggctgggattcgaaccgagtccgagagcccgggacctgctccgccgcttccccacgggcctccggcgcccacttgggggctaaggcgcccccgccgccgggcccctccggacgccgaggccagccgagatcgggccgccggccaggctgctgggcgccgcgcccgtccgcatcacgccgcggtgagtcaccgcgcgccggccccggccccgccccccgcgccaacaaacagcgcgttgctcggcaaccgccaccgccctccagcgcggacctgggttcgagcctcaggccggggtgcgcgctaagagggattttgggactccgtagtcttccctagattaggggttcagatcaggcctgtaatcctggtgggcacggaggtgatggtgaaggagacagctgtggtccaatgaaggtggggagggctgagggtggctctctccaatccagacccaccggggctccccagaagtgggcggtcaggtcaggagatggcggctgggccagagttgcagctgagaggtcgaggccattttcctaagggatttggggagctggcctggcgggagctgtcaggagcgctgtgatgagggcttttttgcatcctccccacccctgccgacctcccaaactagctaacacttaatgagcacgttctatgttctaagcctgttctatgcatgtgtgggcctatgtgtattaactcatgtaatgttcaccatgaagtcgggcgcggcggctcacgcctataatcccagcactttaggaagccgaagcccgtggatcacttgatgtcaggagttcaagaccagcctgggcaaaatggtgaaaccccgtctgtactaaaaatacaaaaattagccgagcgtgatggccagcacctctaatcccagctacttgggagaccgaggcaggagaatcgcttgaacccgggaggcagaggttgcagtgggccaagatcgtgccactgcactccagcctgggtgacaagagtgaaactccgtctcaaaaaataataataataaaaattaaaaatagtgttcaccatggccctctgacgtttcattgacattctcattttacagatggggaaactgagtcaacagagggtcaatgtcctttgccagaggatgcacagccaagctggcatccgggctcccaaacctgtctcaggagggtgcatgcctggccttggcagggccatatctgtgggagtcttcaggcgttgtggggataggtgccaaggctacattgaagtgtgggtaggttatgcaagtgggggatggcgcctggtgggctccttgggggctgtcgacacatgatactgaaggctgtgcactacagaggttgcaccagcacccccctagacttcccatgccatctgagtgcagggagagagtttcccagcaccagcttcagatggcctgaactccgggctccctggcaccccaatagtcaccactgagccgcccacaggacccttaagggagctgcctgaggggccttccggagccccagatcctatggggcggggagaagagtagatactagcatctcagacacggagatggaccagctgcctgggaagtgaccagctttgagtcctgtaagaaatgtccatttggctcacatgaccaagtcaatcactcaaatggttgagttggggagatggctgagttacagggatcctggacagtctaaagccaagaaggtgaggagggcttctcggaggaggtgataccctgggaactgaaggatgctcgggagttggcgaataacaggcaggaccttcctgcgggagaggttgggacaccaggaacttttccaagtggaaggtagaggggacacgtgattggatttaacgggctgtctctggagaatggctagaaggcataaggaaagtcggagaggaccagggaggtggctgttggaatatatttaggccagagatgatggtgacttaaggatacagttggcaga

SEQ ID NO: 897 - DNA, 3218 bp, Homo Sapiens
gtaagcaagcccttaataaatgctttgatgtaatgttccttttgttcacagtacagttatgtagtgctagccagatatttaaaaatgctctaagaaaagcttgtcaggggggagggggaaatgtttttcttgtgataaatgaactttggtttaccaagggtattttgcatgatgctgctgctattttaacttttcagttgttttttctcttactgtagagtgtagtcattgaaaagttaactgagtgatattgttatgtaagaatctgaaccttgcagtgtaaatgcacttaagtcatctttaaaatgttgttaaactactctgaatatactgtgcaatgtaaatgctgaatgattggggttagataaatggtgaaatgagaattaatgaattttatacagattcatgctttcgcctgataacctatgtacagatattttaagtacataaatcagatttgacacatttattttttgaaaagtacatatatgttctcaatgaagattcatcctaggtttcctctttgttcgtttcaatagtagcacatacaatccaaaagttcctgctactgctgcttttgcccttccattttaaatggtatgatcgtttggccaaaatttccatgcaagttgataagggttttacaataatctgaacaaataggaaaccttgaatctctatgtatgcacatgaatacttgattgtgaataataaaagttgttttttatacagcctcattggtgaaaatggttagtgtagtaaatcagatatttcattatagactaatatggtagcagattatttatgcttttaaaaattattttctggagcaaacagtatttgaagaaaaggtaaaaactatgaatgtgtaattctaagaatagttaataattttactgaaggctgaacgtatgtagatattttttatgataaaatgcagtttttctttttttggaacatgccaattactggtatgtgtatatgctggaaattttcttacatatcctttttaagtcaaagttattaacattatccagcatgctttaatatgctccacatatcaaagatataaccaataatttaacgtagcttaaaagataacatttgttttgtttttagctttgcatacatttgtaattccctcccaccaccaatataccttaggtaccatttgtgtacatttcaagattttttttttcaataaaaaggtggggggaaatggaatcactttgccaactattgttctaagagttgacatcagttaccatttctaatgcattgttgtgattttgtagtgtcattcataactggtattgacattttagaaaacaccaaagtgatttaaaatatatgtggggaaaaaaacttctcactctagtaacaatgttttaatcatgttgtttgttaaatatttaaaagttattgttcaatttttgctagactatcttaaatcatgatagtgttgggaagggggtatcaaaatataaaattgttagtttgtgtatataaacaatgcacattaaaacaattgaattgcttccagcatacaacaaactaccttaaaattatgttcaaaatctattaaatatattttcatggctaatgtcgagtatatgttttcatcaattacattgttattgtattaatcgcggttaaacttggcatctcttggcaggatcctatttaatttctgttgccatcaaaatatatttatatgcatgagttttgctataaacctttattttctgctataaagttatatattatgacaaccataaatgcaattacaaattgggtaagaacaagctgaataaaagttgttcccatgactaatattagtcttcatgcttttagcatattttttaagacagtaacactcatcccatcaaattattacattacatttagtatttttctgagttacattgacaagaacttaaattatagcctgttattaatattgatttccaacgactgaacagtacaacagatcaataaaaaagtttatacactgctttaactaatttttgttatactcatgtggcttagtgtagttagtcactaaaacagagttcaagtgagcttggcaatggtgttgagtaacaagaaagaattttgcattaatgatttctttttattttcctcatttaaacaaccagcattactgccaaacaccaaccgtggtccatatttgtaacaggtttttaacatgacatagttagcaagtttgattgaagagatttttaggtcctgggcctataagattttagtatgatcttttttcatgtttctaatgcttgaggtgttactgcttaacttgggaaaaaaaaaaacaaaaaacagtgttcctgccatttgtaagttttcctataatattccttttattaactttaaaactggacttatcgggttcaaataggcagtatcccttttaagtgacctttgcaacccaagtgttacttgcttatttgatgctctcttgtattttaaatctcatttaaatctttgtctgtgaccaacaaagcttaagattttgtcttcatttaaaactctgaatctattccattgatcatgttagacgttcaaatgtttaatggtatagtctgacctagtgaaacaaaatggatgttgttactttttttaaagaatagaatgaaataactatttcacttgcccaaaattttaaatattttttcatctaaacttgtattgtttcccatagcagaatgtcaatattcacagtacatttctgtaaagagcaaaccaatataatgttttgagtgttgaaaaaaattccagatttttgaagaattagacaactcttcatctaccttatttctagttcacacagttatctcaaattccactgaaactaatgggatactgtcttgtgtagatgccagttgagtttataatgtgacctagtaaagctgtcttttttgttgtgttgtatgagtgtcggatcatgcttttaggaatacttttattaaaatggtgtgcattcatgcaaaaggccaactggcttttgtgaacaatagatcttttctcccctttattttgttctcttgacacttttgtgaaaattacctagcctgataaaaacattttgtaaaaatttgtataatactgttataaaatatttataatcccagaaaatgttgtgttaaatcttgtgcaaaaacagtatattcagaataaaagtttatcatttaaagtca

SEQ ID NO: 898 - DNA, 5605 bp, Homo Sapiens
gagatcgcttcctgcagaggaggcaacaggccccgctagcaggtcagggtcccgggcaggcgcaggtgccccccggcctctcaagcagggactgcggcgagctcagacgcggctgacgggcagagactcgcgcttgggctcagtgcgtgtgaagtgggcctcgggctgcggaggagggcagcaccccgtggctcctcgcgctgctgcgagcagggccgcctggcaggggcgggggccggtgggcgggagtgtcggggtaaggccgcggactcctcccatgccgctgagcagtggacagcggggactggagacctccaggtgaggaaggggaacgaagtcaagaaggccacatgtcctggcttccaggcttggtgtcctcagaagcctccagaacgtccatggaacccgcccctgcgcccaccgcctcctgctgtctttccagctgagttccggctgcccctcaccctcggcttcttcactctgcctctccccagccagcgccctgctccccggtcctcaaccaccaccttccacctgcctgggccttcatcgcctccgagctccccttccacaccaaacctggcgtccgttttcctccaggcctgcaccagcacagctgaaggggagagagacccaacctcatccactgggcctcccctcaaccagggccacaacctcaaggggccatgccacctccaacacctatttcccaccttctactctctccacaccctgggacaccacccgcctctctcagctgacgttttccttcttgttttgtgtgcatggtgcttgtgtgagaaagtggacacacagtaagtgcggcttccagatgcgtccgccacctgccctccgtgccacgcgcttccccctacctaggggagcctccaccagacagggaacccacgccttgccacccttctctctccctcccacttcacctgtccgcatcatttctggagccctttctttctggcacgagatgctccagggccctgttgtattctccctgccccagcctgaacccagctatttctgctgcagcctggttcattgtgggagaatgtcatgcagagcccgggatctggctccggatgtgctcattgctactggggtgtcattgcagctggcggagcaagggaacacatctatgtacatgcccacacgcatatgtatacacacagtttcatgggcgtgtttgtctgtttttcttgggcaccacgtgtttactctgatgccaggccaacactacagggctcaacctgttcggaatgaggggcctcctgctttgggagtgaggaacctggctctgattatctcctgtgtaaccagtctctcatccttgcttccaccccaccatatgctacccgctcctcaccctgcgtggcctctgacctccgctggaccaccgaggccccgcccccacaggggcgcctgcctgcctagcacagttgagcaaggagtgaattcccagtgaaatttttttaatttttattttatttatttattttgggtttttttttctttctttctttctttttgagatgggggtctccctgtgttgcccaggctggtctcaaactcctgggctccagcgatcctcccacctcagcctcccaaagtgctgagatcacaggcaggagccactgcggacacagcctgaattgtcaatcatatcactcctgtgcctgaaaccattgacagttcccatcacccgccctctccccagtgtccaggcccctcctcccctccccactatcaagacactggctcctgatgctccccgacaccaccgaattccatcctccaggctttggcccagtggctccatctgcctgggacggtctccccataacctcgtgtagttcaggcctttgcgggtgtcacgtccatggagatgtctccccagccctaaccatccctcccaggtgcctctctgcctgctccgggccctccccctgttgcagtgtgagcactgtgaagcccactcttaaccgctgctccaccagcccagcgtggcaccaggcacacggggtcatcggagaacagctggtgtggctgataggctctgagttctgagtgaggaagatgcaacccagcacagggaccagtgcccagagcaagggatcaggagggacagaaccatcacctgggccagaacaagggcagggtgcgaggaacctgagtggttggacttcaggagagccgggtttccgcaggaaggcttctctgctcggacactcgaggggcagggtggagcatggggcacatccagggctgagggacgatgcagagtcgggggacagtgttctgcacgttggcaggtgaggggtcagaggtggccctcagaatctggcaggcctaatgccagccttcaatgaccacctgaattaaaagtggaaatgagtagcagggagaggaggctgaggcagcagcagggaagcccaaagtgggcagtggccgtttgtcaccagagaccttccagcagctgtgggatgggagaggccccagaaggtccctgcaagcctggcccagggccatggaggagcctcaagaggagtgggcaccacactgcgggccagactgggcagtggcagggctgtaccccagggctctcttgtcccacaggccaccatcagcctggtcagcccatctcagtacagccagggccatgaaggaaggccacacaggaggaccccaggccagtgcccgccctggccatatccaaggggcagggtgcagccccagcacctccagcttatctgtaggtcctctaggtaaggcagggctgtccctggaacttgccccatggcccaggcagaaatcctatttgatggtttatggagggcaaagttgagaggaaggagggagggaaggagcaggggccccgggtgcttactcccaggtcttcactgcagcctggggctgccctctgaagtacacagtccctgggaggcagagacctctgccctgaggacgatgtgaatccaaaggtgcttctcacctccagccagggcccatccctggagataagagacactcagagcccttggtggcccaggggggtctagagccggcctcagacctgccctccctgccccgcctccattcccttcagcccaggcctcttgtatcttttggccctcacctaccaccccgccctctccctggcagagcaaacgcttcccagtaacactcccttctctgcaaggatctcagagatcagcctgtgtccctgagtccagagccacacccggtcagctctgggtccctgagtccagagccatacccggtcagctgtgcccaaccccgggcaagactgagctgggccctggggtggaggcggctgcaccgatactggctccacaccaggccttctctaaaaccccacgggagcgggagatacaattcagatgccccacccccacctgcttctcagcaggaaatggtctaatgtgaaagtaggtcttttaaatccgaattattcaatctgtgcatgtgacaggacccacagctccatctctgtgcgcgccctgggcgccgcgctccagccaggctttgaagggtctcagagctgcaggggacgtttctagatttccagctctggcaggagaggtccctttgtctttccctgggctctgggctcctgcagggcgtctgtcctcctcctaccagcactgtgaggttctccaccacacggccctctgctgtcgtcttcacttgcagtgagatccaggccccaaaggacagagaataaggagggagggagagaggagagcatcgtgatggtgcccagggggtgcagaatgtaggtgatcaagaagaaagccctaattagctcctgcagctttcaaaggaaggggctggtggaggaatgggaccatggcacctctccaaccctcagcacacacctgctgaggcccactgggtgccagggtgggtttagcaccaggctctggccctgaggccaaagcagggcagctctgctcagggggttgagtaggggcctggttcccagcttcatggggagcggccagtgaggaggtgtcaccgcagcagagccaggcacaaagtgagggcaggctgctgtggctggtgaatgagtggctggcagagctgggagggtcactgccctacaaggtcacagacatcatggcccaggaggctggtgtggcaggcagagcgaatgccgggccttgggggcctctgagaggaggctgactgtggccccctggaccccgtcttgcaggtgcggggagttggcctctgtcccccaccaggactcatcccttgttccgaagctccccaccatgcttctcacccccgaccctcctggccaccaacccgtggtcatgaatcatgaattgcacatccttcttgggcacacccgtgcttgcacacccaagctgggtacacacatgcatgtgcacaaacacacatgagctgggtatgtacacatgtgcacacacagtggggaatcggtgtctgctggggggtggaggaggtgatggtgtaagtgagcagatgcattgtgggggcatgtttcctctccctgctagagttggaccagaatccccagagaaaactcacgtggcctcttgtcactctggtgagcagacccaggtgggctgacactcgcagagggaggtgcgtagcttagaccaccagctccagtaaagacctgacaacacccagcccctgcctcccttgcaggccaatggaagaatccaccttcttccttagagtcctttatcacaggctcatctggcctcactgtagaatcccaaaactgcatgcacagagatagaaatcctgactatgtccagtggccctaagtaccacagatgaacctaaaggaagggcttttttttttttttgagacagagtctcactccgttgcccaggctggagtgcagtggcacgatctcggctcactgcaacctctgcctcccgagttcaagcaattctcctgcctcagcctcctgaggagctgggactacaggggcgcaccaccatgcctggctaatttttgtatttttagtagagacggggtttcaccgtgttggccaggctggtctcaaactcctgacctcatgatctgcacacctcggcctcccagagtgctaggattacaggtgttagccacagcacccagccaacgcggggcttttctttctttctttcttttttttttttttttttgagatggagtctcgctgcgttgcccaggctggaatgcagtggcgcaatctcagctcactgcaacctctgcctcctggttcaaccgattctcctgcctcagcctcctgagtagctggaattacaggcacctgccaccacactcagctaattttcgctttttgttttttgtttttttgagacggagtgttgctgtgtcacccagactggagtgcagtggcgcgatctcagctcactgcaagccccgcctcccgggttcacgctattctcctgcctcagcctcctgagtagctgggactacagtcgcccgccaccatgcccggctaattttttttatttttagtagagacagggtttcaccatgttagccaggatggtctcgatctcctgacctcatgatctgccc

SEQ ID NO: 899 - DNA, 1020 bp, Homo Sapiens
ccctgttgtccaggctggagtacagtggcgccatcttggctaactgcaacctccacctccccggttcaagcaattctcctacctcagcctcctgagtagctgggactacaggcagccgccaccatgaccagctaatttttttttttacttttagtagagatggggtttcaccatgttagccaggatggtctcgaactcctgaccttgtgatccgcccacctcagcctccctaggtgctgggattacaggcgtgagcaaccacccggccttattgttcttatattaaaacaaaagaacctagaaaaaattgcttggttaaattgtagagaggaagggagggaaggaaaatgaaggcttttcttctttgttctttaaaagtccaagcactttctttcagaatcaaaatgtagagaggcagtcagtcttggagcatgcttttgcattttaggatactactcattaattcagttttaaagcattcactgggttgagcacaattttaaaaaggttctgactcacccagatcctgtttgaagctcaactcattttgattgaaagagatttgagacaagaatttcagaagagaaaaatgtgtgttacacctggacatatatacacatgtaacagggattgtattccttctagtctaagacaagagattctatggtaaattatttaaaaaaattagttttttttctagcattgtattgtcaccagaaagaagagtgctgaattctctgtttctgcatttcccaataataaatctcctaggagagataactttttgcagttgtgccccccacccattttctctgtggcttgctttatttcccacatatgaatacacacacagcagatacatcatgcacaaactttttttaatgtgtaatctgtaaatctaggcccattaagttttcattgaagttgggaaactgttgaggacttacttttgttcttcaccatgcgtgcactttgccaaggatctttggtaaccaataaaacgatcatgttcactctgaa

SEQ ID NO: 900 - DNA, 2344 bp, Homo Sapiens
acttttaggctcagaagtacatattcaggtttgttgtacagttctgccccatgccactccccaccaccatgagaaaaccaagaggacaggcctcactaggaaaaaaaaaattagccagtaccttgaccttggacttcccagccaccagaactgtaagaaatctcccagacttcatcctgcttcagctcctgtcatcctgtgctgtggaattcctaaacctcttagcttgagccctgcaacgatctgattttcactccgttctaggaaggttccattcttcagtgtggagcacatataagtaagtgtctatttttgactaaaagagattgcctctcatagcgaaaccttgatattggagaaatgaatgctaaacaaacgagcctaggacttcctgctccttgttcttgggccttcaggtttgaactggacttataccactgactccctgcttagactagaactatatcaccatctttcctgagcccccagctttcagacagcagatcattggccttcctagcttccacgatcaagttgaccatctgggtgactgttctccctttttcactaaatgctatggtctgaatgtctatgctgtcccaaaatttatatgttgaaaacaaataatcaatgtgatggttttaggaggtggggcctttgagaggccattatatcatgaaggcagaacactcaggaatggggtcagtgccgttataaaagatgccctggagagaccttttgtcccttctaccagattggaaaagcattggaaaatttgtccaaagtcactcaacagattcatgatggatcctggattcacagccagctttacttggcaataaaattcaagtcctgttcacatcacaacacatttttaccgaaagaaaaatatgatgtgtagatgtttggaggcatcctatcttaatgaggcttttgttagaaagagttttcttaaaattacagggttggggaaataaaaaatgtttgttgctcagattaacaaaaaaatggtatatagaaaataaagctaagaaaggaaagtgcagacaaccaagagactagaattttcaataaatggcaaaattgtggtgttctgtggttacctcttgaagatttggcctgaatcatgcaacaattgccccttaccctcagtcctcaaattacaatagtgaaagaggtttctataggtattatatttgaatctgctatattttgtttattacttgcaaggacatataggagagcaaaagttttccctctaatttcttaggtttagtaactggaacttgtgaattaaactggcaaaatacagattaacaggagaagagtcatagacattttattttaaatttcatatgcaatgtagttccagagaaaagaagtgaaagcctgaagaagcaattagacttgaggagttatatctttaacaaagggtggtgagtgtagagaagtgactagattttttttaagatggttttaggcttccaagggtgataaaccatgggaaggaaaatacatgagggaaactaatggtatataggagttatttagtaaggtttgtttacacagactaatctcagtggtaagaacggtttttctcctttttctggtcaggggaaggagaagggacaccatcacaatgggaatttgtgctttgctggtagacaaataggagcagagcagagaacttctttctctcaattgtcttcagctcagaataatccttatgccaaacaggcataatttggaattacatattttcatcctctccacacacaagcttccgtataaagttcaaagacagtagtattttcttataattcactctgccccaaatattaactaagatgacattctttttccagcttgattctgcaacattcacttccagaaactttatcactcttaatcctggattgaaggaaaatatttgaatgtgataaaggatatatattttaaaaagaaaggaactataataaaaggcaagattcagaaattatgttgtaatctgtgacttagtgcaatttagtccttgaatttcttgtgtgcaatttattgttcatttcccttggtgaactaactttggttcatcgctttatcattcttctccaggctgtttttgaagggtctgtgagctgagaatggtttttaatagataaatgctcacaatcaatttggggataagaaatattattttgaatctcagttacaaaaaatgttatccttcataaaataattcatttttttctcagtaataaaaatgtatttcaaaaatatggtgtccttattatattttaaattttgccaataaaaataataaaaattgattttctctaattatgta

SEQ ID NO: 901 - DNA, 2991 bp, Homo Sapiens
ccgcgacccgcacggcccggacacgcccgccctcaggaaacgccggacgcttgtgggggcaaccacggaccgcaggacagagacccgcgggcggcgggttctctcggtggcgccgtatccagagcagcgcccgcgtgcccaggcggtgatgtcgccgcggccgaggatcctctgtgccagctccggccgcgcagcccggggaggtgcaaagagaaatccttggaactccttgagctctgagaattgggagcaacctcagggaaccaggtgctccagctgctgatagacacaggttgattccaaattggttattgtgaacagtgctgcaatgaacataggagtgcagctaagccttcaacgtattgatttcctttattttggaatccaccctgaaacagcaaactgtaactagatggaaggataaaaataaacatggcaaagcatccacccatcttgaaaacttctgctcagaggtggcatccatcactatgcctgacgtcagtggaacggaaaagtgggaccctcatgtcttggaaatgcagcacttattgactaactctcctgctggaaaagaaacaaaaaatgagcaagctgaacaaatattataagaaaatattttgaaccgacactgaaccaggcaagcggtgatgatatgagaggtcatgacccagagacgaaggaaggagcagagatatgcctgcaaactcaaaagctgcttttcccaaggaaggattttgtttacccaaaagccgtgcaaggaagactagaaaggctgagtagagtgcttgctaatctcctgggtctgtgatgacaaaagatgaaattcagagcccattaaagaagaaacctgtgaaatatgccagaattaaagttaggattcttgaaggactgcacattagcagtatgtgtaaatcaaaaaatagaacagctcccacaaagaattcagcccagaataaaagtatattttatgtgtggaacaaaattaaatatattaaagtgaaatttgacagaatacaaaagagatattctgaaaaccctaatagctattgaaacatttcacacatgtatctcatgcgttaatagaagcagccaaaaatatcattatggggactggaaatgtaaacaatatgattcaaaaaattgaccaaattgacatatattgaatgctagttgcagtgaatacagaatagaaggtctttcagatgtgttagaatagtcaccaaacttaatcagacgtaggagcatgaagttattctccataaatgtcagcgaatcaaatgtacacatgttgtggtacctgctaacatattaaaatgtgtggatgctgttttagtcatggtaagaaggaaatacactcaaatacataaggcagatgggaagaaagactagaaataaatgaacaaaacaacatcttgagaagagagcaaaaaaagcctggtttcatccaatgcatacattattgaaatagaaagaagtattcaatagagaatcaataaagccaaattgtagtactttcacaagattaataaacctaataaaactataataaaactgagaagtacatggagagaaggtagaaattataagcatcaaggatgaaaaaatggccattagtagtagttctagagatagtataaagattaaaataagatgatcagacaagttgatactaataacttggaatatttgattaagttgaaaaattccttgaaaaatacaatccctagtttgactcaagaagacaaaaattatgatatctcttaaataaattttatcctaatgtgatcatcttcctacagtgaaaattcaaactcaaaaaattcacaaatgaattttccaaacgctgaaagaaaaaatatgtaacttaaaaattctttgagatatttttaaaaaagaagaaacaatgtccaactattttatgagaccagaataacatttacaacaaaacatataaagacatgactcaaaagttaaattgaaaggtaatatttactataaatatatattcaaaagtcatgaaaaaaacactaccaaacttgtttcagtaatataagtcagcttgtgaaaattagagttattcattattctgtcagactgaaagaaagccacatgatcctttcaattgctttaccatggcatttgataaagtccaagtatataagcattcaaaaaatgtttaacaaactatgaatgacaggaacttacatcatcagataatgcctgtagtaaaaaaaaatagctgcagacaaacctcatgttcattcatgaaactttccccctaagaaattaagaataagaaaacattgctttctgttaaaatttaaaggtgttagctagttaaataaggaaaataatgtaagatccagaaagtaagtaattaaaatatcatttttccagaatgtataattgtataagttcaaaattcagaatcatctacagataaattagaattaatgacttgctgccttatgaaataaaagaaccatatataacaagtgagtatatctttacaacaaccttagaatttcccacactcaacaattcaattacagaatattataaattccacttatatcaaatcctgtattaccttatgacgtcaagtattaactttgccactctatttgacattgcaagccaccaatccatgtctagcaattttaaccttctgactttattctatttttattttcatagcacacctctctttgtaactaaatacattatttatttatttattgtatatataatttattatctgtttttccctaagttccctgtggatgtgacttatgcttgttttattcattgttgtatctcatatgtgtagatctgtgtttggtacataatagggactcatttctgtaagggttgtttgacctcatgggataccaccaattcactccattatcattgccactctttaggttctgaaaaggtgaattgaattacgtgaattgaattgcgtgttattaaaaacgtttttacaga

SEQ ID NO: 902 - DNA, 5086 bp, Homo Sapiens
catacctgtagtcccagctactcgagaggctgaggcagaatcgcttgaacccgagaggtgaggttgcagtgagccaaggtcatgccactgcactccagtctgagcaagagagcaagattccatgataaatttcaaaatgcagaatttattttagcaacaattttctaactccaatgaataataaattaacaacgaaagaggagcaaaaattattccatttgcttgaaaattgttaaacatctttctataataaatcatgagtaaagtcaaaagtaaaaactgaatgtataaacaaattggagctgaaagacaaggagaacaagatttataggatgtggtcaaagcaatgaaacggaagagttccctgattccccttgcagggcgtgcgacaggggtgtggctcacctgttcagtagccccctctgcagaaaccccttgcgagagggggagcacgcagatgggcaagtgcagaggccggggtgagggctttgggctctggctctgcggtagcgtctagaggtgggtgcctgcaaccccagtgttacaaagctctttcagcttggccaccacagacagctggagtgttaaccagctcaatggaccttctgctttttcacaagggcaaaggaccaggggacagctttctgtattccgagctcttttccagaatccaggaaaaatcgggtcacacacggacttgaaggatgaatgcgaggttttattgagtggtggaaatggctttcagcaggatggatggggagctggaagggtggggatggatgaagtgggaaggtgatcttcccctggagttgggccgcccaggggctggactccgctctgactgccccgagccaaacatctctcggtgtccagacgtccctcctcttctctctttctctgctacgtcgttttgccgtcagtcggcttgcctcgtatctcctcacctgctggtatgctctggaggttggggtttggggtttatatgggggcaggatagggggcgtggtgggtcaaaaagcaactttttgggccccaaacagaaacgcctcttctcatttagggccgcgggtatccaggcttgagggtggggccttagccagggaaccgccctcttctactcagtatttccgtctcctgttcgtgtcagcaatacacagaagaaaatcccagactgcaaagtgctgtacttcttgaagcacttgtgaaaactgactttaaacttaacaaaaaataactgtgagaaagagtggatagggagaaatttagatgaatagttgattgagactatatttatttttaataataacaccaataataactaaaatatagcataactttatggaaggcactgttttatatgtagaacatttgttaactcatttaatcatcacttcaaaccaagagatagatacttttattattccccttttaaagttgaagaagccaaggcacagatgagtctaataactttcccaacactacccaattagcatgtcagacataggaacctaacgcatgcaatcattgtccaaaatccatgctcttaataactatgctacacatctgctgttaagtgtacctgcttctctgcctggcacatgtcggcagatgaatataaagtggatgattatgaactgttagttacaatctagatttgtgccataatgggaaaaatactaatctcaaatggaacatgtttatctttgtttagttaaatatagtttgcttcataaaccaaatcttttggatcacggaatcacagttggtggtaagattgggaatcaccactatagcctccctacaaaaatagctcttacctccataccctctaccccattccaactgcaaatgccctagtttattccttcctttcctcttacttgggctgttataaaaggcttctaactaggcttccattattttctctctcttgattatattcattgctactcaagtaattaatcctgctaaaacattttaatacatctctattgacatcctaagtataaacttccttaccatggcattaagccctctgaaatacaactgcaacctgtatcctaagtcttaactttcattactgcttcacaaaatgcctgtgtcaatccagatgtactaactcttactattaatcatggcaattagatataaggttctgaattgttgactccatgggtccaaattttgactctgccaataattagatctatgacttcaagtccattctttaccctctctgaaacttaatcccttagttcgaaaagatctttattcattcaaatcatggcaagaaactccttcaggaacacaggagatagtggtaccaaaaacagataaccacgcaaactatgcaaacttggaaaagtgcattgctttgtcaaagttcattaagtaggtcttaatattttagcaaaagaaaatcttccatctgaacacagggcatgacaaagctcatttcacacaatggaaggaaggctttttttcttgtttcatgtttgtatgtttctgacactgcagtattaacattttaaattgaatctttaaatgatttttctgatgtcaacaacattattgggaaggccaagctcggtagatgaccttaactgaggtggttacagcattgttcccggtaattcggctttgtgatatatccttcttctcctaggtattaaggtctggtttgaattaaagtccgcagcatactcacagctgtggggagtaactgaaaggacttgttttcatctgatggccaaaagactttcttgtaacatactttttaattgaactcttagcttctacctatttccatttctttttttccaggtactaagttatctctcccttattttatacaacttcctatcttcctacctactcccaaattaataaatcccaattaatcaatcaactcccaattaatcaattatctcccaattaatcaatctctgctaagagttccttacccttccactgagcatggctactttgatccttttaccccaaacataagtatttataatatttttatacctttgtatagtatccattttataattttaccatattctttaatagcgactcaactgcacttctctgatattaagaccatggataatataactcaagagtacgtttttttcataccaacaattccatggttggcagtgtccaagtggttaaaaacatgtctctaaaattaataaaacctgggtttgagtcctagttctgtcatttaataattgtgtgagtttgggaaatttaagtcataaaactctagattttaatctcagacattttctttttggaaacaattaaagtctctttgtgctgcatcagaattcacaaaaaagctatccagtgtccatttacattaattatactggtgattgactatggctatgccagagaatgtattccaggctcaagttctactttttgatgactgttctcaggatcatcagacacctgtccgatgtagcagctggaatatttaagcatcacagtgcttttaaaatagcagacaattgctgtggctgaagccttcagatgactgcagccacagctgacagcttaactgcaattttatgaaagactctgagccagaaccacccagctaactccctcctggattcctgaccatgagaaactgtgtgtgataaatgtcgattgtcatataagctgctaaatttgggggcaatttgttatgcagccttagataactattacattagagaataggagaactgacaaaatgtagagattccatttatcactttaaaaaatctttattttcccacttatagaacattaaatacattttctgcaaaacaaacaaactaaaaacttggaaaatataaaagcacctttaatcacaccactcaaaggaatactgttaacctccaatggatgtctccattgcttcttcagtagaatccccccaaaaatgtttttatgggttgaaagcattaaaaagagtctctatttgggtagactcatttctaggtagtgagattgtatcttactcttcatggtatcaaccccaagagctgacacatactatgtgctaataaaaatgtttaggggatagttcatcagtcttattagaaatcagacaaaatcaaaatatattaccaaatgaactcaattccccatagtacctgctgtgaagcaggacatttagaatgtaaaatggggaaataattttactctcctgcatttgtacagagaacatttgagtaacagttttcccaagcaaagtaaaccaaatatttatctggtggatttaggcagcagaacacaacacagagagtttacatgtttcaagaagttacatacctcctgcaagcgatataacctaatatccaaattatcttagtcaatttgagcttctataacaaagtactataaactgggtgacataaacaatagaaatttatttctcacagttctggagactgaagtctgagttcacggtgctagaacggtgagggactggtgagggtcctcttctggttgcagactgccagcttcccattgcaccctcatatggtggaaagacagctagctagctctctggtctcttcttttaagagcactaatcccattcatgagggctccactgtccaaaggcccttccatcaactactatcacattgggattatagtttcaacatacgaaatttgggaagcacacaagcattcactccattgcacaaatcttctgacccatcctaaacttattaggttaccttatctcactaaatgcagaaactactgggagtgaggctgccataaatctcttctggagaattttactggccataaagaagacagagaagaccgcttgcaccttcccccattaagtaacctctcccctattaggtatataaacccccatctttagttgtttagagtcacatttttctgtgtgctcctgcgtgaataaaaatctatgttttgtctaagtttaattcccaggccctcaagaactgaacctaagagggtagaggaaaagattttcctctccaacaaacattacttacaaaggtaagtaatttcatcttcattaaaaacatgagaaaactta

SEQ ID NO: 903 - DNA, 341 bp, Homo Sapiens
atagggcggagggaagctcatcagtggggccacgagctgagtgcgtcctgtcactccactcccatgtcccttgggaaggtctgagactagggccagaggcggccctaacagggctctccctgagcttcggggaggtgagttcccagagaacggggctccgcgcgaggtcagactgggcaggagatgccgtggaccccgcccttcggggaggggcccggcggatgcctcctttgccggagcttggaacagactcacggccagcgaagtgagttcaatggctgaggtgaggtaccccgcaggggacctcataacccaattcagactactctcctccgcccatt

SEQ ID NO: 904 - DNA, 961 bp, Homo Sapiens
tctaagtcagagtcttctaaaaagcctgaacagctgaggaagctcttcattggagtgttgacctttgaaacaactgatgagagcctgaggagccattttgagcaatggggaacgctcacgaactgcatgggtaatgagagatccaaacaccaagcgctccaggggctttgggtttgtgacatatgccactgtggaggaggtggatgcagccatgaatgcaaggccatgcaaggtggatggaagaactgtggaaccaaagagagacatctcaagagaagattctcgaagaccaggtgctcacttaactgtgaaaaagatatttgttggtggcgttaaagaagacactgaagaacatcacctaaaagattattttgaacagtaagggaaaattgaagtgattgaaatcatgactgactgaggcagtggcaaaaaaaagggctttgcctttgtaacctttgacaaccatgactccgtggataagactgtcattcagaaatactgtactgtgagtggccacaactgtgaagctaggaaagctctgtgaaagcaagagatggctcgtgcttcaaccagccaaagaggtcgaagtggttctggaaactttggtggtggtcgtggaggtggttttgatgggaatgacaactttggtggtggaggaaacttcagtggtcgtggtggctttggtggcagccatggtggtggtggatatggtggcaggggggatggctataatggatgtggtaatgatggaagcagttttggaggtggtggaagctacaatgattttgtcaattacaacaatcagtcttcacattttgggcccatgaagggaggaaactttggaggcagaagctctggtccctatggtggcggaggccaatactttaccaaaccatgaaaccaaggtggctatggcagttccagtagcagcagtagctatagcagtggcagaagattttaa

SEQ ID NO: 905 - DNA, 2451 bp, Homo Sapiens
agagaatgatagaaggcctctcctctgccccacctctttcatgcctttcatgtaggcaaagtagacagggagggtgttttctcccaatcaagctataatcaaactgacttagaagaagctattaatgcacagatccatcattgcttggctatggacaaacgggcaggtggtgctgcacaacaggctgggatgagctctttttttccttcctggacggaaaaggagatggacctaaacagctctgagcagccaacggagggaagaagagattcctagaaggcaagaaacaaaatggccaggtaacccatctgaatagtatccgggcattagcacaggctaccagccaatcagaagcaaggaagtgaagaggaaaggaggactgagggattgttttggctgctggtcactcagagactaagagagagagccttcagactccctcattcccttgtgggatttatgaggaaactaagacccataaatatcaaaaatgtgacccaaggccttggatatagtgattgtcagagttgccctcaacctgggacctctgggatcaagagaagtgagccttggactaactacatgttcactctcgcatcggaaattgggtgtaatttggcttaaatatggggcttggggattgttatcaatttgttatggcacaaattgtcctttttcaatttgccttttctcttcccttcttccctccaaaatatccccctattctttctccctctgcacttccaattcagaggaactcaggtttttacttccttaggaggacgtgctagcatcaccggtgttgtgggccttgagccgagggcctcaggactgtgatgaggctcagggccacagtaagagcagggtttcctgaacacaacactgcacttaaccacacctgggtgaaaatttcattttcttcacacaaagactgggctctaaagtgtccagtgttctatgagtctcgataaggtgaaataattctgttattgttgactcatagattttctgcttgcatgtatacctaaagactttttgcaattcttgccagggtatatattttttaagatacaaaactgtcttacaccccacagcaagctttaatcctgtgaggacaatctgtttctcctggcaacactaaggctactagatgaacaggggtcagccgggtagtttgaagagaagccttggtaatctgttagacaaagctgagaattctctaaagaatgtctagcaaagatacttcagtttgaagtgaatagaaagggttttgttcacaggccctgccttgctgctggattcaaagaatgtgcagcaccagaaaaggacatcaatgtccttcttgaaaatgaaacacacacgcgcacacacacacacacacacacacgtgtcttcttttctgcctgcattgagcattgcataactgtggaaaagttcatcacgcctgaaaatatgtatctttcctttgatccaaagcaagtgctatattggaataaagatgccatatcttccgcctttagtaaaatgaattgtcaaggattttgcttcagaaagatcaagaaaagaccaaacgattctgcagggtgaggcctcagagttcaggctgttgattaggagttaggggccctgtaagtcttattggttctcagctttctcactagctcatgtttgtgaccttaggcaaggcacttaagctctttgtaccttcattcctccatttgaaaattagagataatacttgccgcctacttaaactcaaagggatatgtgaggattagccaattaaagtttgccaaatgcttgggaatcaatggagggaaaaatctgtatgaatataaggtatcattgtcagtcccgcctgactccctcttcactctcttacccctcctgtttccaccctctcttttaaaggattgccttcctgggaaactcatgagcattatgcatggttttacttatggttgctattgtggaaagtggccatctcctattattaagtgatttgtttgaagttggtcctttctataccatcacgggggaggtttccaaatcaaagcatcctagactgattgtcagtgaggcacagctggcaaggtttcttttgggtttacctttagcatcctgtagagaggagaaaacaaccattttaatgtaaaatagtaagcataatttggaaatatttgcccattaggaatacaaagctagtgaggtacaaaaataaagtcaatttagagcccttgttacaatccttgaagaaattccccttttaaccaaaacaataatagtgcttcctatttcataaacgttgctcctctggctgttacagccacgtgaaaaatgagtgtaacataactatggcatattatctgtttgtttcacaattggaaaattgagatgcagagagattaagtgacttgctcaccacaacttagctaacgaacggaacggcaa

SEQ ID NO: 906 - DNA, 5965 bp, Homo Sapiens
ctctttcatgcctttcatgtaggcaaagtagacagggagggtgttttctcccaatcaagctataatcaaactgacttagaagaagctattaatgcacagatccatcattgcttggctatggacaaacgggcaggtggtgctgcacaacaggctgggatgagctctttttttccttcctggacggaaaagctgccacgtctttgagctgctgagatgttgccatgatgtggtggtgcctgaggagtggtcctttctttggcatctgcaggccctgaggcatggtctggaactggaagaggaacaaagggttgctgaagtctgctttgcaggtgtagctggcttgctgaattcttctcctttgcctaaagagagaggctggaccattcctaataaggtaagctcaggcctggaaaatatcggctcatcacctagcttcttcaagccaaaatgcttttgacctacctgcacactgctcttttgctaacaactctcttcctatctctctgggtttccctataaagaagatagaagggtctgtttctccttaaggtttgtaggaactctatcccaaaaataaatccctccttaactgcatagcggaacggttcactgacagctccctgtctcactgtgggctgaccttctcctggctgactctgccaagaccctcatattttaaggatgatgtcttacttcccagtttccaccccacagcccacctgcctcttccattcctccctctactcaagcaggagatcgatgatctaaatccctatttgcagatggtgagaatgaaagtaatataagatataaagtaataaggcataaagatgggactacttttagtatgaatcatttgaaattcctttctcattggtcaaaaagcagttaaatattggcaatttcagatgattcacctaacgattctttttgcccaaggaggcaatgtgaggtgcacatcagttgcctaagtcagctagactcattggatgcccttgacttcaactactgcacatgcctggataattctcaaatatgcatctccaattcagcttctcttctgacctatcagacatcctcatttggatgtgacaaatgtaccccaaatctgtgatgtccaaaatggcatcattgttccccacttcagacctgctcattctatatccctgtggcaagtgcctccattatccaaagtcaccaaattctacccaagggaatattcgtagctgttctctcttaaatcctccgtctcagttgatagacacataagttaataatatctccttcatcgtgtttaatctcctttctacctccccactgctctcttctaaattctcataatttcttactggcattctagtaacaacctcctaattattttctctgcctccagttttctcacatctccaaagcctgtggaatccttcaatcagggacatttttctgaaacacaaatttgatgatgctcttcttcttccatgtctcctattgccttttggtaaaggcctcattcctaaacacccacaagaatcttttatctcatggttatcaaaggaggttgggatctggcagtattatctctctctgtctcttttttattttcagacagggtctcactctgttgcccaggctggagtgcagtggcacaatcacagctcactgcagcctccacctcctgggcccaagctattctccttcctcagcctcccaagtagttggaacagctacctgtgtgaccttgggcaagtcacttggcatctctgtacccccatttatacaaaggcttttgatcatcagtcttcacatggtctcccacactgccctgtgctgatggagcagagacgcaaatgacgtgggccatccactttaactgtctttcaaggcctttccaccaggacagtacctcacaggccttatggcctttggagtctggacagcctgaattctcatcagtaaatacttcaggtacctaattactacccagggaggaacaatgtggaactacaagcccagagatggctacaggtgggcagaagcgggagacatgcaccatcatccttccagaagaggaaagtgatacgtaactgtcagaaatctgattaaaatttgcacatgaaatcagttagataaattatagaacataagtcatgattctacttctgaaaaagaaataatgggtaatttttcatcaaaatagaaaataaatatgaatcactacaatacccaagtagttgttcccatcccttccacccccagcaaatgtatgcacaccttgtgccagtggatgggatgcagtattggaagtagaggaggctggagggggtggagggtaggaagaaagaacccagatgggaagaggtgggaaaatgtcagagagaaatttcccttgagtcccaatttgcctggagctgcttctgcctggagctctacaagaaaagctgttcagaaaggaggccaaagagagaggggagaaaataaactcctttgtgaggttttccagaggtacacatttctgaaaagctgattgtatttcttcctaatcattccagtccagagtccaatcagcacaaagactgagacaataaactcacatcacaaaagtttctgggatccaggcttcttttcagggacaaataatacaatttccatctggataatttgttcatcatggccctatgttttcttaactgtcgagtggagaaacaaaggcaggactcagtaccaacttctatcctctgtggatagcacaaagacatcctgcatttgccctggaggagcagttcatcatttgactgtattttgtacacaaacaaccatttttcaatcagatcaagattttcctactttcattcatcctaataccctacttctgcacaatcagtcagattggctgagcagaaaggctagcttgttcatccgtgtctggaaatgccagatgtacttttttttttaagcctggaatgtttttcactgaacttggccaagtgtctgctcagaggggagctccaggtgctacccctggactaccggctcccgggctgcaaggggtctgggtctcgagttggattgtgagggctagagcattcccactcaccccagtaccctgcagtgagccggcttggagtggtggcaagagcatacatttcagagacagtttctagcaaccttccttactagctctgtgacttcatgtctcatagttggcacgcagtacatggtagctattgttaacatttattagtgacaaatgccaccagcattaagacactattatcctctagtcccttgctactcataatgtacccacagatcagctgcttctgcatcacagggagcttgttagaaatgcgtcagaatctgcattttagcaagatctccgggaagttcctacacattaacgtttgggaagtgctgcagtctagtcaacactccctggcttcctggaagggccaacccacccagtcacaatgcttttttcaggacaatctctcctgtgttcaacatttttttctacaacccaaatcttggcacatagccaaatcaaatatgaattcatctaatggaaacaatgaggtagaatatttgacattgagtttcactatcactatgtttaactcctgtctcataaccattttgctttcctatatctgaaaaaggggaagaattattttaaacagttcaccactccagccccttttattctagtcatgggtgaggctatatgttagctttttatgcatttctctgcctaaacatttcttctaaggaaaaaagattccccagcagacacaccatgggaatctgccttcttctggaaatcagtccctgcactgatggagctggtccaggtaacgcctggcgtcccctcttcagtgaatgccacaggccctgcctttttgatgcccctttatttcagctgcgtgggcaggacaccaggctatttgcaacagcaatttctgaacatgacttgcaatgcatacttgccagagagctaccacttcatcaggactgactgaattagaggcagagacagctgctgctggtaaagtcttggtttcttggtcccaggcctctggttcccacatgcgatgccatggagaccctgtttggaagcagcaatgccccctgaactgtgagctatcactctaaatgtttgtgcaaagggagttcagtccacattcattttttgtaattattttctatttttccgattttccattctagaagatatatatgttcacggtatgaaactttcagccagagtgggcctcatcaagtagccttgaccaagaactatgtagttcatgggctgcatggaattgctctggcaaccactagaatcaaaggaggggctgactgtgggttctggagatagtatgatatggtagcagggatttggtcatttccaagtaatacaaaaccaactcaaaccagctcagattggcttggtaactaggaagaatgctgggtggctcacaggtagaagaaagagttatagaaccagaaacttatgaattgtaatggggatcttaatgtttccaggagtttctctccttgctgtgtgtgtgtatatatggatctatatcacacctacacacttacatgtttgcatgtatttggttataatgaaacctcattaaatggtggtgtgctggcttcctttattctaccagaaaagagggctatgagtctttctttgtctcattttttctctaatatgaccctaaggggtcagcaacctactggcctagtagcctgtttctgtatacccccccactcccacacctggcaagttaaaatgatattaaatttttataaggttgtgaaaaagcaaacaaataatgaaggctatgagacaggaccatatggcctgcaaagcctgaaatatttactatctggccctttatagaaaaaagttgctgactcctagaaggtaagagacagtcccttacctcctccatcaattctaacagaaacttccctgggagagaggagtcctccctgaagagtcaatgtggcaagggagaccagggatgctgattgaccaggctcaagtcctgtgacctcagggtacctgggggcagaacaggagctctcccaagaaaaagcagtgtacagtttcccaaagaaaagggaagagtcactgggaaagcccagtgggataccctgtaagaaaacagatgtcactcttaaaagaggactatttgcaacagcatggacagcgtggaaggatggagaagagcattgggactaggaacagaggactcttaggcctgaaggggtaagggaggggagtcattacctaaatctacaggagccttgactgtcagcttggtccctgagctggagagagagagaacacagcaaccactaaacagcagcccaggggtaagaaagctcccactttccccaccctccaggcaagccaacaagaagccagaggccaagtccgagaggccaacttcctgggcacagagcaagtttcctcatctgtaccacgaacttagatacgcaaagggcctgctccacaggcatgagcaacaacacagacagtttcctgcctttcccccaagtactctctctccctctttcccaggagatggacctaaacagctctgagcagccaacggagggaagaagagattcctagaaggcaagaaacaaaatggccagattctgggcactcttggctgagttcctctctagcaactggcaacagccagatagttgcctccaccaagatcatcctcccctctctggcagaagaatgtttggctaaaggagaagtccaacacctcttcctcagggcagaacagctctgacagaccatctcttttccagaagtcctcataagcttggctgaggcctttgttgtaattgcattacagttccatttcttactaggcccaatacttttcccttacctcttatggctattattctcaaaagtatgctctcaataaac

SEQ ID NO: 907 - DNA, 2821 bp, Homo Sapiens
ggaccatgacccttaacctcaagattctgtgacttgtcagggtggaaaaaaatgtatgtaaataagtatagatgtgataagctttaataaagagcaggggaatttagagaaactgtaccaagcattaaatgtattatttttagtaaccagaaattccttctattgatgtaattaagattttatagtgtttgagaggccaaggcaggaggaccacttgaagccaggagttcaagaccagcctgggaaacatagcaagaccctgtctctccaaaaagaaactaaaaaattagccagttgtggtggtgcacacctgtagtcccaagctgctagagaggctgaagcgggagaatcacttgagcctaggagttcaaggctgcagtgagctatgcttgcaccactgcactccagcctgggtgacagagtgagacactgtttcaaatagaaaaaaaactgcatatagtactttactctcagatatgagtgtttctgttgaccaggaattttaccattcctggttctctgatgcggaggtggccttgtgaaaggacacagtttctgctgagctgaacacgctttagtgtaatctgatgaagaacttctatgctggttgcggtattggtggaaagtgttttattttgcagaaaaagcacaaattccacagagggcaacagttatccattcactccatagctatctattgctgcatgacagactaccccctaaaacttagtggcccatgccactattttattttgcatgattctgtgagccaggaatttgggcaagattcagcagaacagctctactccctgtggcactggctggggtcatggacggttgtgtgccactggtgggtcagttgagaggggggcccagccggcacagggacagtgaggctggaccatccaaggggcttctttcaggtttctggtgcctcagcttggatggctgaaacagctggcagctggccagggctctccagcagggtggccagacctctatgaggtggcaagggctctgaaagtgaatgctccacaaggatgggcccagtgtgtcccccttgcatcatgctggctcatggatcactggccaaggccagtttcgtggccacacccagagtccatgtggaggggcctgcacaggacatgaagccaggaggtatagttcacaggggaacacaaaagtaacgttcactgcagggacagagcagatcactgaagggaatgccactgggaatcgagccccatgtcctggcccctgagcagagttctgtccccaagaccattactcctcatggaacttttcacctccctcacacttacggcaatgctaacagtcactacacacggttctgagaaccttcaaattgaagccctcatgatgtttcctaagaagttgcagttgtccaaatccacaaacccagattttagttggcaagtctgagaggttctgggtaactgttttgctgcacaaacgtgggtattcctgaaagtttaaagattcatcttcaacatgctagggaaagccaccatgatagctagtctaataatgcccagaccatcccctcattgatgaatggaaggctcacattttaagatgaatatgggccagggaggtttcacctttcttggctgaggttgatgccaaagtgataaaccttggtgcttcccgcctccctgttccctggggatgggccagaatcagatgccatcagggaccctgcaggcaattctgagaattccttttaagaagacacctgcaggaagggtgaaccgctttctagcccttctgcagccagccactccccctgccttttgatgacacaggttctgcataaggtgagagggaggacagggtgacatccatttcttgtaaaaatgcctcaatgagaaaagggccacatgcatttcttgtaaaaatgcatcagtgagaaaaacaacagcagcagcaacaacagcaaatatttactgaatctcctagtatgatccaagcccccaaatcaagaaaatgtgaatgctgatgtaaaaaaggaaggtatttgttcaaactgcctggccagtgtttttgaagaaaacagagatctccagagaccccttttttggtcctaagtagcaagcaaacaagttcattaaatgtgtactgtttatttgtgatgtctccaagcagagtagttggctcttgttatatatctgggagaataatcaatgatttatgcttctgacagtcttatcatagccatttacataatggtcatgtgtatttgtgactttaataccctctgcatatagccttaatttttaaatggattacactgttttgctgttgtgactttgcttgtttaatcatagctaagacttttctgaagtcaaatactttttccattatcacagtgaggcgttggcaaaaaagtgggggcttgctggttacacttgctgaaaataaatcttgcgtttatttggactctcaagattggagctctgaattcacatagtccagtgtttatgcacagagcaccactggcattgccattgattacgactggcatgaccactgccagaggtttagcagccctggcacacatccaccaaatgccatttcaatcactcagaaatttctacaacaacagaaggccccccacatgttgggatagtgggctgcccttgcttgagcacagctgatcgatccaaccactggtcagcggttgcatctcctcttcaacactcccctaaagggacagatcagccgggctctgctccagcatccccagcgatgaagaagtcaccacctcctgaagccacattggcctgtcctcattattaac

SEQ ID NO: 908 - DNA, 1757 bp, Homo Sapiens
actcgtggcctgacgcatccgcgagactgcacgcggccaggcgggggcacgaacgggttggggcatgcgcgggcagcgtcgagtgggtcccttgggggtgggggtggggggcagtcgaactagggagagagtctgtggaagggctcagttgtcacttcacacctttccccgctgtttattgatctttaactctctctgtgtgtcctctctctctctctctctccctctcctctctctgtttctctctctctatcccttcctgtccaccctttggggccatctcttccaagaaacaaccgtctctcccagcccatgggaaattgtctctcctgcgaacttatccaacctgagggggtctcatccatgccgataccggctgcttgtggaaccttgtaagagttcttccctctccctgtaaaatggagataagctgtgtggtgctgaggccagcgccgggcacactcaccctcaccttcttcctgagagaggaaagagcctggagacctggattctacctctgcccccaacccctaccacagggtagccctgccaccacctgctggttctttgggcaagtcactcttttattggacttccatttcctcagctctaaaatgaaggaggtgagcccagtgtggtggcacctgtagttccagctacctgcaggctgaggcaggaggatcgtttgagcccggggggcagaggttagagtgagcggagatcttgccactgcaccccagcctgggcaacagagcaagaccctgtctttaaaaaaaaaagtgattaaaaaataaaaataaaatgaaggagttaaacaaactcaggaattttgtatgaatggcataaatgagcacattagaaggaagcaactttccttctctctttttttcaatcctgtacaggccagcttcccctctgccctctgctcccctcctccctccctaccatcctccagccccccaaagccctcccaatttgagcctccttttggaaaacatctctgagtatggtaccgttggtatcggtgactaagaggctccaaggatacccttctgggggatttccaaaataatgaggaagtccatttccaaaatcatgggaagtcccaactgggcctcccagacagttggccactgagtctgtcccctaaaggatctgcttgacttgcacagtcttaaaggcatcatgtctggtttttaaacataatttcagttagtagccaacagttcagatcaagggatcacacggcctgtttgacctgttcttgcagggtcatgcatgctccactgagccatgggaagtgtccacacccagccatgggagccctgtgggatctgaaactgacatttctgctttaggtgccttaagctgaagaaatgcatagtagcgggaattggagtgcaagtgagtgcagtaggggaagtattttgccataagaaaccctaagcctctatggacaagaaattctccaggggcagactggccttgaccccagaaatgtcacattggactcggccttggttttcctcatctatacaatggtcaatcagactagtggtttgttttttgtttgtttgtttgtttgttttctctgtcgcccaggctggagtacagtagtgcaatctcggctcactgcaacctctgcctcctgggttcaagcaattatcctgcctcagcctcccaagtagctgggactacaggtgcacgccaccacatccagctgatttttgtaattttagtagagatgaggtttcacc

SEQ ID NO: 909 - DNA, 4892 bp, Homo Sapiens
gaaagggtacattcgccagcagttttgccacgagagtacaccgaacaaagagacagggtcatttgtaacctgatgcgtccaccctactgctgtgtccggtttccattggctggaacgggacctcatattctgtatttgtcctgattgggaagcaacttaaaactttttaaaagaggcgaaggcagaagagaacaaaggaaggagaaagtaacttgtggaatggtgagaaaggcatgaggcgaattctcagccatgacaaggctgaaggccagcaggaacaggctctagcgaaatgggtgctgtgtccccttcctgcatgtggcagaaagttgcaaagtttcatggatttgaatgtgaacatctgttccctggacgcactgccaacaacgtggtccaactggtactcatcgttggaactaccaagtcaactaattttttttttttttttgagacagagtcccactctgtcgcccaggctggactgcagtggcgcgatcacagctcactgcagccttgacttccccagggtcaggcgattctgtcacctcaggctccctagtaggtgaagactacaggcagacaccaccacatctgagtaattactttttgtagagatggggtttcgccatattgcccaggctggtcttgaactccctaaggtcaagtaatccacctgcttcagcctcccaaagttctgggattacaggcgtgagccactgcatccagccagtcaacttttaataaggtccttgttaggtacagtaagggacatgagatgaaaaagagctggactgtcttcttggagcttacaggttagttagagaagatattaaaagacagatgagatgggcctagactctctgcctacatctttctccagtgctggatgctccctgcccttgaacatcagactccacgttcttcagttttgggactcagactggctctccttgctcctcagctctagacagcctattttgggaccttgtgatcataatttatttgcatgggagctcctgggatcatagcagacaggaggcaggactagattgtagcttcagacagagcagcatgcagaggcttgcattgtgaattttagctctagatcaactgcaagaacaaaccagcaatcctgagaggacccacagaccctctgaaggaagcggattgctcctgcagggcccgggagacccccaaatactgtgagtgccccaactgtggaagtgggaaagggagatcctcctctcccgaacacacacccccccactggagaggctgaaggtctgtttgcaggagaaatttccaactttacctggagctaagtcagactcagcagagcgaactacaggggtagaggaagcagcagaaaggccgtgggagctcgctgggtccccagaaggcccattcctgcctggcaccacagggatccatcgggagggtggccagaggagcaagggataaaactccacagggagaagaattctctagtcgaacttcgtaacaatttaaacagggtgagaagcctcctggccagaacttgggcaactgcacgaatccagcatgcagacttcacaggtgggggaagaactacagcccttttctttcgctgctgggaggggcacagccttggggcaaattttcaagccagtctcaccctctgcctggaaacagactcggggcagttgtgggggaacacggtgggagtaagaccggcccttgggtttgtgtgggagctgggtgaggcctgtgactgccagctttcccccacttccctgacaacctgcatgactcagcagaggcagccataactctcctaggtacacgactccagtgacctgggaatctcacccacattccctacagcagccgcagcaagacccgcccaaggagagtctgagctcagacacgcctagctccacccccacctgatggtccttccctatgcaccctggcaggaagacaaagggcaaataaatcttgggagttctagggccccgcccactgctggttcctccccatattaccacagctgatgctttctggaaaggaccacctcctggcaggaggccaaccagcaaaaaaaatagaccattaacccaccaaagctccattgtaccctctgccacctccaccgaacaggcactggtagccatggctgagagacccatagatggttcacatcacaggactctgcagataacctccagtaccagcctggaactgggaagattcgctgggtggctagacccagaagagagacaacaatcactgcaagtttggctcataggaagccacatccataggaaaaggggcagagtactacatgaagagaacaccccatgggacaaaagaatctgaacagccttcagccctagaccttccctctgacagagcctacccaaatgaacaaaccctggtaatatgacaaaacaagacgcttcaacaccccccaaaaaacatactagttcactggcaatggatccaaaccaagaagaaatacctgatttacctgaaaaagaattcaggaggttagttattaatcagggaaggaccagagaaaggtgaagcccaatgtaaggaaatccaaaaaatgatacaagaagtgaagggagaaatcactcagggaaatagatagcttaaagaaaaaacaataaaaaattcaggaaactttggacacatttttagaaatgcaaaatgctctggaaagtctcagcaatagaattcaacaagtagaataaagaaattcagagctcgaagacaaggtcttcaaattaacccaatccaacaaagacaaaaaagaataagaaaatatgaacaaagcctccaagaagtctgggattgtgttaaacgaccaaacctaagaataattggtgttcctgaggaagaagagaaatctaaaagcttggaaaacatatttgggggaataatcgaggaaaacttccccggccttgctagagacctagacatccaaatacgagaagcacaaagaacacctgagaaatccattgcaaaaagatcttcatctaggcatattgtcatcaggttatccaaatgagaggtgacaatgtgctagtagccctcactcgctctcggcgcctccttggcctcggcatccactctggctgtgcttgaggagcccttcagcccgccgctgcactgtggaagcccctctctggactggccaaggccaaagcgggctccctccgcttgtggggaggtgtggagggagagctcgcgggccagtgagggcttggcgggccccgacctaggagtggccggctggtgccgccggccccaggcagtgaggggcttagcaccccggccagcagctgtggagggtgtgccgggtcccccagcactgccagctcacccgggctgtgcttgaattctcgctgggcctcagctgcctccccgtggagcagggcgtgggacttgcaacccgccatgcctgagtccccccctccccctgccctgctccctcatggccagagcctcccggacgggcgccgccccctgctctgcaaccagtcccattgaccgcccaagggctgaggagtgcgggggcatggtgtgggactagcaggcagctccacccacggccccagcatgggatccagtaggcaaagctagctggactcctgagtcgggtggggacttggagaacttttatgtctagctaaaggtttataaatacaccagtcagcactttgtgtctagctcaaggtttgtaaatacaccaatcagcaccctgtgtctagctcaaggtttgtaaatgcaccaatcagtgctctatgtctagctaatctagtggggacttggagaacttttgtgtctagctaaaggattgtaaatgcaccaatcagcactctgtgtctagctgaaggtttgtaaacacatcaatcagtgctgtgtctagctaaatctagggacttggagaacttttgtgtctagctaaaggattgtaaatgcaccagtcagcactctgtgtctagctcaaggtttataaacgcaccaatcagcaccctgtcaaaacagaccaatcagctgtctgtaaaatgggccaatcagctctctgtaaaatggaccaatcagcaggatgtgggtggggtcagataagggaataaacgcaggctgcctgagccagcagtgcaacccgttcgggtcaccttccacactgtggaagctttgttcttttggtctttgtggtaaatgttactgctgctcactccttgggtctgtgctgcctttaagagctgcaacactcactgcgaaggtctgcaggttcactcctgaagtcagcgagaccacaaacccaccagaaggaagaaactctggatgcatctgaacatctgaaggaacaaactctggacacaccatctttaagagctgtaatactcaccatgagggtccgtggcttcattcttgaagtcagcaagaccaagaacccaccaattccggacaaagttaaaatgaaagaaagaattttaagagtctgtgagacagaagcaccaggtaacctataaaggaaaacctatcagattaacagcagatttctcaggagaaacactacaagctagaagggattggggtcctatgttcagcctcctcaaacaaaacaattatcagccaagaattttgtatccagcaaaactaagtatcacatatgaagaaaagatagttgttttcagacaaacaaatgctgagagaattcaccattaccaagccactgctacaaaaactgctaaaaggagctctaaatcttgaaacaaatcctggaaacacatcaaaacagaacctctttaaagcataaatcacacaggacctataaaacaaaaatacaagttaaaaagcaaaaccaaaaaacccctaaagtacacaggcaacaaagagca

SEQ ID NO: 910 - DNA, 1331 bp, Homo Sapiens
gatctaacctatatctaattggaattctagaaagataaaatagaaataatgagagccaatattcaaagacataaagagattatcattttctagaacttatgaatgacatgaattcacagatgaagaaaaaagatataacaggcaagataaatagaaagcaacagttggacatagtatggggaaatgcaggacaccaagacaaaagcagccaaaaagaaagggcagattatctacaaataaattgtaattaggctggtaggtgatttatcaattgtaacagtggaaaccacaaaactattgaataactttagtggaagaaaattttgtcaacttagaaaaactgtcttaagacaatttagacttaaacaatagtttactacaaaaaagtctttattaaagaaacttctacagtatgtacttcaagaaaaataaaaaataagagatttggacctaacacctggttctgtcactgattccttgtgacatggactccatttcttcaccttagaacaaatgctgctggagagattattcctctgcttaatggagggattattcctctgcttaaatttaccatttaaaaataccaccaaaaccacaaactcttaggatgcatgaatacagtttaactgctttgaatagcatttttaatagcaaaaatgtgtttatactataatagcttacaaccatcttttcaaaaattcccagtttcatggaacttccattttagtggggacaacagacaaaaatgcaaaggcccttctgaagcaggagtgtgcttagttgaaaaaacaagtcagtgtggcaggaacagactgagaatgggagataagtaggagaaagggcagtaatgctggtcattttccatttgctgctctaaatctgacctgaatgaaccacatcaacaagcttctgtactccctctggctgggtccgccagcctgtggtaggctaaataatggccccaaaggtatccaagtcctatcccctggaacctgtgaatggtaccttatgtggcaaagtgactttgcagatgtgatgaaattaaggaccttgagacagattattctggattactcagggggccctacatgtaatcacaaatctccttaggcgagggaggcagatttggcagcaagaacagaaagcagtataacaatgaaacaagatgctatgttgctggctctgaagatgaaagaaggagccaaggaatttggttctagaagcaggaaaaggcaaggaaatagatgttcccctagtgcctccagagggaatacaagtctgctgctaccttgattttggtccacaaaacccatttcagacttctggcc

SEQ ID NO: 911 - DNA, 2005 bp, Homo Sapiens
aatttgttgttgttgcttctggcttttaattttattgtgatgtggtctatagaatgctacttctttggcatttgttaggacgtggttggtagcatactatatggtcaatttattaatttgtaattttttaattaaaaaaggttttagagacaggatctcgctatgtttcccaggctggagtgcagtcactattcacaggcaaaagcatagcacactacagccctttaactcctgggctcaagcaatcctcctgcttcagctttccaagtagctaggactacaggtgcatgataatttcacttcacactttatttttaaaagtttatttatgcttgagaacatgtgtattctttaattctcagagttctatatatgtctctttgttcaagcttgttaattatgttgcctcaattgtctatttaattactaatttttgtctatataactactgatttctgcttagatctatcaactacggatctatcaaatctgtgaaaggaatcttaaaatctccactatgttgctatctaaatttcttttccttttgtatcagttttctgtagattttgaggctaaactgttagtgtgaacaaaagttctctgaaaaggaatgtgaaagagactttactgcagtgaacagtttacaaattggggagacacagccctcagtgtaaaatgaaggtgcattcctgagaacaaagggaggctttgggtttcacagtgaaagctcctgtccaggttcctaataagatctgtttatgcaaatgaaagatacaaacttgcttagttctgactgggtaacagagctgagctctgattggttgatacagccgagccctgtttgttgatacaactgagcttgcatcaacattggttggttcaggtgagctctggatgtgtatcaaggtggaacagaggtcttggttttggcagaactcagagttggtgtgtgaactgtagtcagccaatggtcgcttggctctattataaatgtaggactggttagccacttgggatccatgttgaaagattggctctttcagatatatgttcacattaggtacatatgtgattattacatctttacgattaattttttctttaatgaatatgtaatgtccttcttattcataatcatgtcttttgtcttaattattctttcatctgatactattttttcaccagtggcttttttttttttttggttaatatttgcctggtatatccttctatcctttatcattcacttttctattttagatatgctccttataaacagcatatagctaaaacttttcctattataagagtttccactttttaattaataagacaatctctttacatttattgtgcttgcttttttaaaatactaattctctttaacttcctgccttgtactggcttgattatgaagtttttgtgtgcttatttatatgaaatattccattcatgaagataagaattgagaccagtataggtaaaatgaacttcacacacgcagaacgcagctttatcgaattgtttttcatcctttgtttggaaatcacagattctgctcctatttgttttagtggtagccattagcttttaaacatgcatctgtgacctaacccaggacaagaaacttcaagtacttttattccaatctcatcatttattcagtttgtaatagctttttagtattttatttaaaaaaatcctttaaactactcattatttctctttttgatagtttgagtcaatgcctgtctagatttacctatagacttgacaactatattgtttgcctgtgagcattaaaaaacaatattttctgttagtggcgaactgtaatagctttttatgaaaatgtctttattttactctcagtttttagttgtggtttagttgataatagaattctaagttgctagttattttccctcagtactttgaagctattattccagtattttctatcctgtaatgttgctattagaaattctgttgctatttgggttat

SEQ ID NO: 912 - DNA, 2618 bp, Homo Sapiens
agacgccctgcggccgctttgcctgaccaaagtctgtgggcgtggaacaggccctgggttctcctactgggaagaatgaagttcaggtactccatgtgatatatggttccacaatcctcagcgtgttaactgaagccttgttgagtttaacaaagctgccattgaagatctggggaaagtgaagaagttgcaacagagttttgggctcacaccattgatacatttgatccttaaggcccaccccgcctcactcccaccctcttctacttaattcaggatgtgaatagcacatgccttccatcttcagacaaacactgaggcctggacaatgacctgcattaggtagatagaatctactgaaagctaaaagccttttcctgtgtcttagcagcacggaagccacgcctccttccccccaatgtttgtgcaaaccctagagaagaggagacagcccctatgatgtgtgaggttgaatttcctgccctcaacccatcaaatcaggcagaatgagggctcagtcagaactacaactacaaaagagaaaaattttaatgtgacttttcttgtctgctcagatttttgggttaaggttcatgccagctacattctttgcataataaaatataaatagagtataaattgttctagttagagaaaacagcaaaacagtgctctcccaagggccctaataaatcactttacagaaacgtggatgtgtgttggatttacaggatttctatgccaagcagagaagtacgtgaaaacaggaaagcaaaatgcataagttgcaataatagttttgtggtttagctgaataatgtcctatatcaacagaggataatgattttagtttttcagttgccccaagatcatttccattactgatgaggcttgaaatgtctgtgaagaagagtcattgcaattgatttatttgtctggcaaactttttgtcagcaaattcaccactacctcaaaaatctcactagctactctatgcttaagacattggaagcataagccacaatgaaaactaactcttagcattagaattctaagaagcagtaatgtatttatgattttatgttaaaaatctcccagatgtcagcatttaaatcacaattcagtaatataagtaatttgaaattagaaagttttatacttcaccattctattttcctcttcaaattgaacacagtttgaaagaattaagaaaagaagctataaaaaataaattgttcaaggattcttcctgtttctaaacaccacaagattatgatgatagagacatcatttgaagtggtagagagtactgtgaaatatctatatgtgaatgtaatgaaaatgaaaaaataatctgatgaatttttaaaattaatcttgttagagtcatttttgagaaattgtatgcaagtgtattgattgaaaatgaccttctcattcaagaaaaatttattgagcacttaccaagtgtcaacaggtgaatgtgaataaaatagatatggtccctgccttcttggagttgaataaaatagcaaacacttattgaatatttattatatgttgtgcattataatattaaccaatgtttattgagttgttattatatgccaactatgccaatcctgtcctaagcaatttatgtatgttaactaatttaatcctcacaataaatctatgaggtaggtactattatttctgtcataaaattacaaaggcatagagagataatttgtctaaggttccatagagtaagtaggggacccagaattcaattcaaggagtctttttgttctgcatgacatctcaactgctatataaatattatttagttcccagggcaaatttttcaggataatattcttattctctcaattttacagaagagaaaactgcagtgtaaagaggtgaaataactcaccaaaagttaactgacaatgatcctacccactacatcacactgcttaactgggaagacacgcaatttaacaagtaccaaccaggctccacatttaaactctgaccccgtttgaccttaaagtaatgcatttttcttcaaagcagacacttcgccaccccaaaaaaaaccatatctgaaaagacataatgtacttaatcaatggcttcctgctataatcaccacaaccacatcctttcctagaatcgtatctgtcttattgaatccttccattagcttttctcctatacatgaagttcaaatagcacacctgagtttttgagggcatacacaacttacacattccaggctcaaatatttttttcctcccctgactcatgaactttttgaaatttaacagtttcttctatcttttatgctacctggtctatctgaaccaaacatatatattttgcagtttcctcctaaaatacattcaaagcactgttttgcttcgcattgctgatatttaactcctttgcaatatcactgctacttatacacaaacaaaaatctggtgttttttaagaggaagccaaactaaataaatcattttaaagatatatatatggttgggtgtggtggctcatgcctgtaataccagcactttgggaggctgaggcgggtggatctcctgaggtcagaagttcgaaacaaacctggc

SEQ ID NO: 913 - DNA, 3861 bp, Homo Sapiens
tttagggacaagaatcagattcagaaatctctagataataaaactgaaatcattattattttgtataaatatatctacattacttgcttatttaataaaggaatacatttttaattttctaggctattatacatgaaatgttgctttggcttttgctttaaaaaaaaaaaagtatttggtaacatgtggacatttactaagcaaatgtgatagcttaagattgagggtagccacctgtaatcccagcactttgggaggccgacacagccagatcacgaggtcaggagttcaagaccagcctgaccaacatggtgaaaccccgtctctactaaaaattaaaaaacaaacaaaaaaaacgaaagaaaagaaaattagccgggtgtggtggcaggcacctgtaatcccagctactcgggaggctgaggcaggagatataattcctcaatttagccttcccacctcaatacagtctgataacagacgagcctttattagtcaaatcagccaagcagtttttcaggctcttagtattcagtgaaacctttatatcccttacggtcctccatcttcaagaaaagtagaatggactaaaggtcttttaaaaacacaccttaccaagctcagccaccaacttaaaaaggactggacaatacttttaccactttcccttctcagaattcaggcctgtcctcggaatgctacagggtacagcccatttaagctgctgtatagacataacttggcccatgatagctagtattcagttcttccttttatgcacaaccacagccagcaggaagctaccagagaatatgcaccagtgaaataaggttgtaaataaaaaagatatgcaatccatgaaacagaacatccagccaaggatcataacagcaaatgccagctctggtgagcacgttatattgaaaagggtgtgactgtggtgaaagacttgccacaaatcatgaaacaaaaccaaccagcactgacagatcatttaaaatgtttaaatacttctttgtttgacatttaaaatgttagtcacgtttctgcaattttaccgcctgaaaatatgttcactgcaaaattttggcataaccaaaagcacatctggaagttacatttctcaataagctaaaaataggatttagggttaacctgaagtgtgtcagcaattctctgagaagggtggattagagtgctcctaaataatgctgaagtgtttacaattcaaacacacctgaggcatctcttcacatcctgttttcctgtaactcttgtgatctcctgggcccttgtgcgtcacctgggttggaggattatccatccgctctttctaaaacatgctctaaaaaatgtcttaggaaaaacactatctaaagtcgtttataagctattcaaatttttagtaaaatatcaatgaaaagactttctaaatgcctgccacatgacaccttcgtgtaccaaaacctatcaaaattacatcttaaagtcattttttgttttcactgacaggaccatatttctcttgcagttgtgtagtttgcaatgccagatgtagggatgtcaatatttaatggataaaaatatattttataaaggagcccactgggatcacttctaaaggcaagaggggaataacagacaatggggcgtgcttgaggctagagtgtgggaggagagaggggatccaaaaaattaactattgggtactaggcttagtacgagggtgacaaaataatctgtagaacaaacccccatgcacgagtttacctatataacacacctgcacatattgccctgaacctaaaataaaattttaaaaaaataaatactctatagtaaaatcaaagataactataaacataatattttggtaaatgagttaaattactgaatagtctagtgtttagcaaaaatttacaaaaactatattttccactttgactttaaggataatttaggagattacatatgttgcttattactgacagcaagagagattattattttgagattctaatctttaagtattcttatttgtagaaaagtattaaaggtaataataaaataaaataatttatttaaaggaatttttagtacgtatttgcaaagtgaggtatctctttacaaacagttactgtactaagttgtgtatgtctatgtttacatttgtaggtcttgtttttctaaggctataatgagtatagttaatcgataatattacttttgcttaaaaagtaagttaagtcataaagatatttaaatgtttggaaaacattcttatgcatgtatctacactgttctcttttcctgtgctcttcatttctttatggaaatctgaattttatatggatagattttcaatgtcaagtgttgatcaagaaacaagtcaccagattatactttaaataccacaggttcaatgtaaatttaataaaaacacttgtatataagatatacgtatctattattaatgaatatataaggaatagaatttaatattaacaacatttagaaataaacagcctaagttaagaatagtgatgcttgggagagtgtgaaagggagtggaacagaatgtgggaagaatttttaaaactattttgactgtgtctgtaaaatttgtaatttttattaaagcagatttagttaaacatgttaaattttaatgttatttttaattctagttagaatatacatgagtgtttgttataatttcaccctcactacggggaattaaaacttttctcaaattaacatgaaaaagaacaaatgcacacatctcagcagaatcagaaaaaaaactaaagataaaagtaaggtatcatccttaggatcaaaagcaacagctttgcaaatgtgcacagaatgagatatgctataattattcatcacctctttctcacaatgtaacaactatttaagaagaatggtttagttattttaaaagagtgttttcgggttttttttctgcccaaaaaaaaaaagtactattacctttttttcctgggtttacttggtatataaaattctttttaaaattttatttttccttaagttattggtatacaggtgatatttggttacatgagtaacttctttagtggagatctgtgagatcctggtgcacccatcacctgaccggtatacactgaaccatacttgttgacttttatgcctcgccccccctcccactcttccccaaagtatattgtatcattcttatgcctttgggtcctcatagcttaagtctcatatgttagagagaacatacaatgtttgcttttccattactgagttatttcacttagaataatagtctctaatctcatccaggtcattgtaaatgctgttagttcatacctttttatggctgagtagtattccatcatatatatatatcacagtttttttatccacttgttgatcaatgggcattggagttggttccacgattttgctattgtgaattgtgctgctataaacatgtgtgtgcaagtatcttttttgaattacgactaaaagaatggtttaactatttaaaaagaatgattatcaccaaatgaatttggtgataccatcaaatgaatttggtgataatacatgacatgataattatgataataattttaaagcagaaatcagtcaatattttcagagagagattatacaaatgcaatttagactataacagtttagacttatatcttagagcatgttaacatgtggggaaaatgatctcttgtgtggttatttagaaagggaaacttttaaagaagaaagcataaatgtgggcatattctcatcttttacttaatgtaattagagtgaacatattgaagccacatactagaattttat

SEQ ID NO: 914 - DNA, 1387 bp, Homo Sapiens
atggcaagtccggatagaagtaaagggaagacattaaaagcaaaaaaaaaaaaaaaaaaaaaaatgcccccagcttgctggaagcaagtgcagattctgaataagtcaaggcatgttgaagcactgaaagcagcagcaactgggagtaatgttccaagtggtaatcagaatttcagtcctagtgtcataactagcaaatgtagacattctgaaaatggtgcttcctcattggactctaataaaaatttgttactagagaaaagtaaagtattctctcagaattgcagaaaaccagtagaagaaatcgttcattcagaaacaaaattggaacaggttgtttgtccgtatcaaaagccaagtaaaacaacagattccccaagcagagtctttatacaagaggcaaaagattcactgaacacttccaaaaactgttctgaaaaccattttgaatattagacgaatgtaacaggatccctttttgagcagaaaggggcttgtagtctaaagtccagtttctgtccaccaagtttattgagtggtggtgttcagatgccaaagtctgcagcaaccagtactgtggataataagagaactgaccagatggttttccatttagaaacaaactccaatttggaatcacatttgccttttatcaaagaaaaagtgacaacattttaagttcagaagacttaggttttgtgcctgttgagaaaacacctaacttggtgaattcaggcacttgtaacaactgtgctgatgacattttgaaaactgaagaatctagtagaacctgtccttccagcatttcaaattgtgaaagtgcagattcaacttggcagtcatcacttgacactgataacaacaacagccattatcaaaaaaagaggatgttttcagaaaacaaagaaaatattaaatgcatgaaaacttcagagcaaattaatgaaaatatttgtgtaggtttggaaaggcaaacagcattcctggaacaggtcagacatttgaaaaattacatcaggaaattccagcaattctcccaatgctgaagttatggctgtacagaggaaacttgattctacaattgatttgacaaaagaaggcctatccaactgcaatacagaaagtccagtatccaccctggagtacctttgaaaactgttttaaactcaaagagcctcattggcacaaaatgcagcccaggttcctgagtcctttgagcacctgccaccactctcagaaccaccaccactaatacccgaattagtagataaaatctgagacacacttcctcaccacaagcctgagctcaaagtgaaatgggttttgagacccaggggcattgccctgactggcaatataaccaaaatcaatcccagtgcactcctgt

SEQ ID NO: 915 - DNA, 1871 bp, Homo Sapiens
aaagtgcacaattcagccaggtgtggtgactcacgcctgtattcccagtactttggggggccgaggtgggcggtcacctgaggtcacagagacctgtaatcccagctactcgggaggccaaggcatgagaattgcttgaacccaggaggtggaggttgcattgaggccaagattgcgccattgcactccagcctgggcaacagagtaagactccgtctcaaaaaaaaaaaaaaaagcaagtgttcctcagcactgagggtttttaattttttatatgaaaagtctgttgaaggatatatgttagaagctgttgactgaaattttcattctagattattagattatggttttggattgcttattgtcactttttcatattttagtcaccgcccaggagcctgtctgcctcctgctgctgttcatggtgcccagactgttcatgccaagggacacgtgcaggccagcactgggccgtcctcagcctgccttggccctccttccgtgttcgctggcgcccaaaggctggaaggggccactgttaaaagtcgggttaagatgtggtcactgggcctgagggatgctaattgcctgcctccttcgggattgcctttcccaggttctggtcaacggggtacgagtcaaagtgatgtgggttctcttgcagtaattttatcatttctctatagatgttgacagtttctaaagtcctaccaggcattttttctaagtgaccttatttgggaggaaaaaggaatatgtgtcagaagggaaaaaatgtagtggaacaggaaggaaagggagggatactattttgctactccaaagtaattgatagaggattcctttggagggaggagtggagagggaatttttgcagttgttttccattctactgctttaaatcattacctttcatttaaactcatttaaatgtctacttttttctgatggattccactctttctggtcaaaagtattgaggggaatttgaaagacaagtcatcaggtaggcctggatttgatcccaacaatagttactgacttctagagctaaatcacatgcagagatcattagatataaggtgggaaccaggaatctgcattttaacaaattcctgaaataattgtgttcatgcagatggaccttgaaccacaattcaagacacactgttacagagaaacaactcttagagcttttattctcactgcaatcttttacttgaggatttggttaagatctaaaatgacgtctgaaagacagatgcttgctgtgttagaatcatgtctcctagttcactgcctttggacccaagatgtccaccttgagttctgtttccttagcttagtggttcttaaccccagctgcacattaaggtcccctaggatactttaaaagaaaataccggtgtctgcacttcacctccagaaattctgatttaattgctctggagtggggcctagatggcctcagtgatgttaatgtgctgccaggcttgggagcagctgccttaaactgagtctgaccctagatgtttcttggtcctattgcaaatccttgtgtcctttgcacccatccaagccaatgtgtcttaaggttacatatagtcagactcaagctggagcccttgttgaaatattatgtagtggggattattgtagagaaacactttgatagaaattgtaacatatgtaatttttcaagaaactgataagattattcaccacccgtagtctactcagaggctactcacctgtagccaagtgagtttaattcccttcaaaatagtcactttggggattgaggcaagtctttttaaggatgcttcaatttttcaaaacccatttggccttttctctgttttagacgttgc

SEQ ID NO: 916 - DNA, 3530 bp, Homo Sapiens
actggttccttgcagctgtgactccccagggtaagaggcaaagagccaccaggtcccagctgaggaagccctgtggtcagctcagacagggatgcggactgaagccgaagcaggtgttagtaattgtcgtacctacagacgaggaaaccgagcctccatgaagtgaagtgactcacccacagtcacacagctaatatatgccagagcccacagcagaacccagacgtactgaggccaagttccatgccagcataaaacaggctccagttctccctggattccaggaacaccatctccttcctcgtcccttccatcccagggaaggtttacactgaaaattttttgtgatgaaaagatttgaagaagatgacaggagatggagaagcaccagctgatctgcagactccaaggaggtcccaggaagaggtgtcatccactaagatcttctgggacaggaaagccctgtgatacctcttacatcacaccaaacagagccccacaccaagaaaagagctgcccacacctcacagaagccatgttagtggacatttctccactctggaagccttcctgcgtggtggaggccagtgcagaccatcctctgcccagaagagttgcattctaaatgacccctcagagagccctctggatggccgcctctcccacaggtccctgcaatcacataaaaaacactcattgcagccaagatgcacaaagcacagtattgatttcatactcaggtttttccaaaacaaatcataaacccacaccaattatgtccaatcagttttatggataaagaagcctgagactctccaacaggagagcttgagtttcccttctcactcttgtgctgggtgtccttttcctacctccagaccatcacaaggatatctgtaatgtagatgaggccagtccttttgcccaatgttgacagacaagaggaagattccagggagaaatgccgcagcagcaaatgaatatgaatgatgcttttccactttgtgcttataaaatgccttttgtaccagaatctcaaagctctccaggaagcaaggctttgaatgggactttcactcggggtaaacatgagtggtcggagcttcccaagtcatttgtgataagaaagaacaaaagtccgggcacttttaaaatgcaatattcttgccttctgggtagtaaacaaagtgtgcagatggataatgacatctgtggattctggctccacttcctagagagaaaaaaaacatgtaaataaatacgtaaaaaattgtcatatgtggatgacacccttggttcatccagtagttaccattctgcctaacattcacgagctatggattctattactgggtcccttgtgactgcattacactgagaaagtaaaatatatttctcttcaatgcctgagggaagataaatgttatagaaatgtttagtaaaaaggtccagtcagtggctttgacacttgatgcttttgcactaagcagtgctgtccttttgttctctccattggaagcctccttgtaaatgtttaatagctaaatgactcaccagagtctgcaaaggtcaggcccttaactggaaaggcagaggggaactcagaagcagtctctatcagattgattggaaggttcatttgagaattctttccttctcatccttagtttaaggtgcacatgcagcatgaataactgcctgggctccagccaccgacatgcctgaacagcagacattagtgactctgacactcttcctaggattcattcagggtattaatcagcttcagaggaaaactcacaaacactctaagaagaattctgttgcaaaagtgatacctagcagagacagtctgcccttgcagtcacttgcattatatcccaaaagtcaatgctaagagcttgcaaaagaatttgagttcatcaggtgtccagaaaataaactccttcaaatgcagtcgaaatagtttcaataacttcaaatactctgcctgttatgaatctacagagcagcaattaaataattatcagttaatgattcaatgtcagatacctataaccaagggtgtcttgctattacactgaaaattacatattaaggttttgctggggtgcagaaaatgatcccccaaaatatagtgcttcggcatgccgagtactttgaaaatcggaaggttttagaaatcagccttagacccaagctctctttctgactttccttacctccttgtttctctgatcctctttctagaagcacctggagggactggactgactctctggaattttcttatctaacaaagcttctttccaaaaaaaaaaaggcaattgtcttaagaccaccccccccatctttaggaatctcatcaaatgaccaggaaagaagcaaagagacggagttgtcactatacccagatagactactcatctattctcgagggcaggtctgacaacctttgtgcaaggtgacgtttcactcctcaccttcccaacacctcccccagagctcagaggaacttttgtcatttactcctacacacctcatccccgccttccctaagaagagagggtagacaggcatctggaccctgctgggttattaggccattactcttctgcaattccccatggtatgcacgttaaaataaacgcatgccttttctcctgttgctctgcctttttcagttcattttcagcaaaccttcagagggtgaaaggggaagttttcttctttgtccctacattttgcattgtcttataccttgacatttttctactcgtcaagttaaactgtaaagcaaaatatagatcattagctgactaattatttttgagttaaaaagtagctagcatttggttttgggtaccacagtgtgtctaatatagtctttttagaagcaatgatctataaacattttttatcattcaccatttctggttgagtaaagtgactcacagttgtagtcctacctattcaggacgctgaggcaggaggatcacttcagccgaggaaggagttcaagtccagcctggacggtctctaaaaatattaaaatttaaaaaaaattctgaacatgcaaccccaatatgtatttatttgtaaatgatatactgtcactaatacattgacattaaacaagtagaaaacaatgtaacattttaatttattgactgataattagttctattttcattaatattttttaaaagagcaaaactgctgaataggcttcttttatttttgagaatctttgttgaaaactttgtggtgtaacagtttgaggtctccttccaagtcaagtttattttaaaatgtggttttaatggctgtcgtcacttaaaatatctcaaaagataagcaagcctacttgaaaaaatcacccggtctcagggtttactaaatcaaactgctcatttcggttgtatgcacaaatcacgcacaggttttaactgaaatttaattagttaaatttccatcttctttgaagtccatcagtcttttttttaacaaaccaattaaacagtatcaag

SEQ ID NO: 917 - DNA, 3944 bp, Homo Sapiens
agcaccagacgcagctcctctctcctgatgggatggccctggggctcctggtggctctgacttctgtaaagcgtctccctccggcgcctttccctccaccagccggtggctgcacagtgccctgccttgtttctttcacacagaagtgagggcaggaagcaggctgtgccagctcacaccacccctaatgctcgcagcgctgactctaattgtttccaggaagatcgcagctttgcttttgtgctgttcctggtgaatgccatccgttgtctatgcacaaacatggggctgagagtaaaccacatttccttgtggaagcaggacttcaggatagccaggtccacgaacaatgagaaaatccggagcttcccagcattctgctcaaggcccagcatcccatatcggaacccgccgcacccactgctctctcagctcctgagcctccacaccctggctgcctgggaacacctcaggcacatgcaggtttaatataatcaaagccttcaattagggggtttagtccatatggaggaagtccagattctgcagatgagacaagcatggggagcattctgaggtgctggctttctgagcctgaaatgttcccccaagtggaggccacggccggccatcccactgaacagccttcacctcagggcagactcagtggcaccactgatttgtcactgaccgtcacgattccagctgaagctgggtgcagatggggtttcagctggaagaggttttccctttgggccagtaatcctataaaagtcatcatacctgtctggggagatgggcgatttccctagaatggagagtccaacgtgcaggagggagctgctcttcctgtcgggccttgggtgcacccctcatagggctcaggtcccactgctccagaaaggacctttaaacactcaggtcgagaagcagcaagatcacatttggtatttgccctagtcttaaaaacaataaacaaagcatgatagggagcccatgggcagatgtctgcaatttataaatgtgtgccctgaagcaccctcacccttctgtgctcatcacctctgagccccggggacatgcaccccggggaggccagccctgccctcactgccttctgtggcctctgccttccatctttctctctacatggacgcagggctaggaaacctagagactgggttctaaaagaaatagaaacctcttttttaccctgctcctgagagtcaacccttctgagctcaagcaaagggcattcccggtcctcagctccttgcccccacatagatctgaagtgagcctgtaccgcccacctctcagttctcaactgtcgcttaatcctgccccacaataggccacccctgggctacaacttgagcttctaggtgtgcacactgaaggctctgaacaggctcacagcccggggacactcggcaaggactccccacattcccagcacctgagcgaggcccagaaaagagaggggcaggcaccagattggcagctttgtatcctttctgcccacccccagggaaagggtgtagcccatatatggggaaggggggctggggaggccaggggctctgcaagccagggtccacgtcacttaggactgaaggcggcactgcccaggcaaatggcacctgaaaacccaacaggaacctggaggcccaaagcctccaggcgcctaaaaacccattcacttttctaaactgcatagtcccttatttgaaccagtaatgtccttaaaacctccagtgcagctctatctcggagggagtggaggtgggacctgggaaagccatccctctctcactccagatggcttggggccaccccttactgactattttcattctaaagaggttgcttctgtcaccctttcagcttctccagacccctctccttccatctttctctcttgtataatctaacctttcctgaacccaagcagaaatgcagtgacaaacccacaagatattcaagtgctggcacgcttctctctgcacttgcactttgcctgggctgactggcttctcaagggcaagtctaagggaacactggccagtgccacatacagactttaggggtcagggacaaagagatgtgatgtgtgatctacagcgtttctcctgtagatcaatgacacagaagacgccggaagggcaggccccattgctgaaacgtttgccaggtccaaatggttttggagcacacttgcaaactttcaaagaacagctaatttttgtattaaagtgtttcagagcacaaaaagatgggaagtttctcagtttattctacaaggtccgaatagcactaaaaatcagagagatactagaaaaagaaaactatagctttattcatgaatgtagatgtagaaatcctaaatgaaatgtaggaaatggaattatttattctaggaattaaaagatagctcattttgtttatacacgtgaggaaaataataggtgaaatgttaatattaactcatgttcataaggcatcaataacgcccaatcacattgctgttaaaatctcttagtcacttgggaatagaggacaacatgtttaattggattaaagtatctgtcaaaaattaataagaaacatcaaacataaaagtgaaataccaagaacctagcaccttaaatcagaacaagacaaggataactattatcacatctattattcaacactccagaaatccagtgttttgggggacaagagaagacatattacttaaatatgatatatttgcatcattagaatatagtcagaaaaccaaatctagtcagcagcctatttctatgaggttttattaggacacagccatgcctacttatttatgtattgtctgttatgactgcttttatactacagtggcaagttgggtagttggaactgagatcctttgacctgcaaagccaaaaatattccctgtctgactttttacagcaaaagtttgcctctcccaaaataattaactgaaaacaaaattaaacaagaaaatcagtagggtaagcacatagaaatataatcagtagtttttctacataccatccatcattaattagacaacataatggaaaagaattccatttaaaatagcaactaaaacaacaaaatatctagaattaaacttaaatgtgtgagaataatatgaaaacaaaaactaagaatcctttctgaggcataaaaggagactcaaaaagatatattacattcatggacatgaagacgatgttataaagataccaattatccctaaatataacatacattcaatgcaattcaaatgaaaatttcagtggttattttggggagtataagctttagaatttggaatctagaatagaaaatgtaccacagtagccaacaacatttggaaaacaattgagtagtgaaggaatgatacaaaaatatactatataaaaataataactaaatcagcacagtaattaacggaaacatagtttggaagcagatacgtgtgcataggaatgtgtccatgataaagaggacatctccagatgggggacatgacagactacccagcaaatgattttggagaaaacgcctatacatttgaaaattaattatggttctatttcacactctacccaaagacaaatttcagatggaccgaagatctaaacataacagccaaaacaaagtattgggtaaaatctatgtgaatatttttgaatctcaggaagaggaggtgatcctagtgcatagcacaaaaccccaaaggcataaagaaaaagatggacaagaaggaaatccaatgtttttcagtttttaaaggaaaaataactaaccactgaagaaaagccaatatatatacagggagaaaaactttaagatatatcaacaattaataccctaaaatgtgaagtattccaatgaatttgtaaaaaaattaaacactctattaaaacttt

SEQ ID NO: 918 - DNA, 1104 bp, Homo Sapiens
gctcttcaccagagcctcctgactccccaggaccccagagaggaccgaccctctccagccgacctctgggctcaggacagctgggtggggcagccacaggagctgcctgtagggagcagagtcaggacggggaccgagccggacacccattctggaagtgtctgcacttccagactgctggccagacccccaagctagcccgccaggcctccatagagctgcccagcatggctgcgtccagtaccaagagttggtgggagacgggtgaagtacaggctcagtctgcggccaagactccatcctgcaaggatattgtggctggagacatgagcaagaaaagcctctgggagcagaagggaggctccaagacctcatcaacaattaagcattccggtccctggaggaaacatcagacaaacacagatggagggaccttcaaggactgacctgaactgttcttcggtgtcaaccccatgatagacaaaaagaggcagaggaactgttccagattaagggagactaaaaaggtatgacagctggatcaggggaaacgtgccttaaagggcattattgggactgttggcgaaattttaagtgaactgtatattagacaattatcaaggactacacgattgtatggcatcaacctcaaattccccgaacttgagcactagagtcttcttgttctgatggaatatgttctgaaatgtttaagggagaggagaaggatgcctgcaactgaatttcaaatggttcagggaaagataatagagtagaatagactatatagatggagaaagtaaatgtggcaaataacaattggtgaaggtgggtgaagggcatgaaagttctttgccttacaattaattcttctataagtctgaaattatttgaaaataagagaaatgctttcagctgtgaataacagaaagtctgactacttgtggcttttgcaataaagacatttagttatgtaacataacaggatttaagaggaagaaggcaaggacttgaaaaggctcagtgatgtagctgaggccccagattccttttatcattttgtccaaaggctccaccttcctgaatattactgctttataccct

SEQ ID NO: 919 - DNA, 2509 bp, Homo Sapiens
gggctcagagctcgccgccaaggggcgtggcctccgggccgcggcggcctctgggagttgtagtcccgcctcaacttgtggtggcctctttaaaaaaacaaaaaacaaacaaacaaaaaaacactggcgcttgggtccgtcgctgcctcggtgtccctgtcgggcttcccagcagcggcctagtggaaaagtaaaagatgtctgaatatattcgggtaaccgaagatgagaacgatgagcccattgaaataccatcggaagacgatgggacggtgctgctgtccacggttacagcccagtttccaggggcgtgtgggcttcgctgcaggaatccggtgtctcaatgtatgagaggtgtccggctggtagaaggaattctgcatgcccccgatgctggctggagaaatccggtgtatgttgtcaactatccgaaagataacaaaagaaaaatgggtgagacagaagcttcatcagcagtgaaagtgaaaagaccagtccgatttaatagtgttgggtctcccatggaaaacaactgaacaggacctgaaagagtactgtagtacctttggagacgttcttatggtgcggcaaagccaagatgagcctttgagaagcagaaaagtgtttgtggggcgccgtacggaggacatgactgaggatgagctgtgggagttcttctctcagtatggggatgtgatggatgtcttcgtccccaagccgttcagggcctttgcctttgttccatttgcagatgatcagattgcgcggtctctttgtggagaggactcgatgaaaggaatcagcgttcacatatccaatgccgaacccaagcgcaatagcaatagacagcaagaagtggaagatttggtggtaatccaggtggctttgggaatcagggtggatttggaacacttctgtctacatgccttctcattcaagaattcgtcatcacgcatcacaggccgcgtctttgacggttaatgagaatgatccagaagggaggagaagctaatggtgcagtggagagcagagtccctgagcagtggaaacagccatgaagatctttcatctcttccaagcaccacctggtgtacctcgctggctgccgggctgaggtggggcaggggttacgtctgctcttcgatcctgtgattcaagggggatccattttcgtcttctttggtgtccgacacttcgctgagtcccagagaaggaatatcttcctcatatggtcctaaaaggcaccttggcttcctcttttcctctctggggaagtcacctgctacactgtgaggacatccaggcagccctacggagaggtccccatggcaaggagctgaggcctctgccaagagccagcagtgtgtgagaggcctgcaagtgaggctcctggaagccggtcctccagctggcaggtgacagaagcccccaccagtatcttaccgtcaacatcaggaacgaccctgagctagaagtacccagctaagccgctctcaaattcctgacccaaagagaccgtgcaagcctgagcaagatcagaggggagcattgccttgcaaccaaattcttcctctgcaataacgagtgctgctgagtaaggcattcttcaggaagatggagggactcaattggtaaaggagggactctggaggttctctatgggctggcagtaactcttgaatctggggaagaaggagagaaaggaaagagtggagaagacataatcctcaaggaagctgtgggcttaatttcttacaaatttcccttggtgcgtctgcccagagacccgggggagctgggtccttgtggtgagtggcttcctgggctcactggctctgatccctgtgccagcgtcccagggggaagggaagaggccccatctctaacaagtgtctgggggtatgggaaggaactgggggatcaggagccagacttctgggccaggaaaggggtgaagaagctcatctattttacttcatcccttgaccttcaaccccccaagtggcacctggcctacacagcagcttcccacaccatgaccatggactctgcctgactctggagtccaaagcccagccctgaggctggcccagtcaggagggtgcatctcctggggagaagggcaccagaaatggtacatccctccttcctcatgtgcccagcactacatgcccactatcttgaggttgaattcgctgattctctggaggtcccgtccaggtggggcccctgcccacatggttactcaggcaagaaatgtggacatggcagcactgccctgccatggttcttcccacctcgggcactagcctgggactattccccagggaatgcaagctgacatcccgagagcacccccccggtgggaagttctacagaaacagatggcgttgccagggaagttccaacagctgtcttatatgttaatgcttctgaaactggacacatttcacattttgaaaccagcactggactcagtaccaacaggaataaagttttttaaaacgca

SEQ ID NO: 920 - DNA, 3489 bp, Homo Sapiens
tcaagagatttaccttttcaagcacatgatgctttcattcctgtggcttggcagtaaaattttgaatcaggaaatgtgagtctccagcttcgttctttttaggattggtgtgagtcagctctgtccacgtggttgctcataggaggttgtgagtcagctctgtccatgtggggtgctcacaggagggtgtgtgtcagctctgtctgtgtgggtggtcacgggagggtgctgtctgtgggtggtcacaggagggtgtgagtcagctctgtctgagtgggtggtcacgggagggtgtgtgtcagctctgtctgtgtgggtggtcacgggagggtgtgtgtcagctctgtccgtgtgggtgctcacgggagggtgtgagtcagctctgtctgtgtgggtggtcacaggagggtgtgtgtcagctctgtccgtgtgggtgctcacgggagggtgtgagtcagctctgtctgtgtgggtggtcacaggagggtgtgtgtcagctctgtctgtgtgggtgctcacgggagggtgtgagtcagctctgtctgtgtgggtggtcacagaagggtgtgtgtcagctctgtgtgggtgctcacgggagggtgtgagtcagctctgtctgtgtgggtggtcacaggagggtgtgtgtcagctctgtctgtctgggtgctcacgggagggtgtgagtcatctctgtctgtgtgggtggtcacaggagggtgtgagtcagctctgtctgcggacctccgtgaaggccagtgaaatggacaggacaaggtgcttggcctgcggctggagagccatcttcttaccccctggccacatggttctgggaaggcactgacgctttgtaaaacttgcctggtgtggaaaatgatggcggtcatatgtagtaccttagaaggctgtgctgggagttaacgatataacatagcgcaaatgcctgacccctgggagaggggcagtgagagtttgttgaagttgggaagtcgaggctctcagtgaggtgcagacttttcctgtccaggaatgggagacaaggagctgtcattcactcaagcccttcgtctgccagcccctggcctgttatacaccccttttcaatcctgtaaggtaagtgttcttatctccaacttccaggtgggaagtctgaagctcagagagcctgggccaatggtacaggtcacacagcacatcagtggctacatgtgagctcagacctgggtctgctgctgtctgtcttcccaatatccatgaccttgactgatgcaggtgtctagggatacgtccatccccgtcctgctggagcccagagcacggaagcctggccctccgaggagacagaagggagtgtcggacaccatgacgagagcttggtgagtaccaggccaagctgtgctttcctcctccacggcacagctcgggttggggttccagagggtcccagctggccctggaaggtaccttactctaggcaagaatgaacaggttccaaccgccagcatttccttagctctccctggacagcctccgagattaagagaccaaaaactccatgatgtgatataaatcagcaaatataaaaaacaaaatcttcactctgcaactgagagacaggacaggagtccaggggctcaggatgaggatggcatcgcgatgagagacagacgccagctggaacaccctctaggcaggccaccctctgggcaggccgtcagccacagttccatgtttaggaggaccttgacaaggtcattcataataaaattattccccggcagagcatcacttctcggagggaactgtgtctctgaactgtgttcagtttttgtcccggggagctctgtctggtgctcacctttgtacctgcagcaggtgcactgggcaccatgttattagtgtctcagagctgagttcatgtgcatttcttcacctaagaacccactcacaatgaccccaccccagctcctgcagacccggcagaggctaggacgtggctcaggagacaagtagggtctttagagaagccccccggtcactccctttcaagccataagttcccaggtcctcaatagttggctctgagtagaattgtcagagaatgggattttcttaaccatcacaatttccaagtagactcaggcctaactcccagcaatttgtatgtcagactctacagacaattctgtgctgtctatttttgctcatctttaaaacagccacgaaatatgcagcttcctttccctgagaaaatggcaaagaaaattcaacacagaaggccagggagggtgtgtggaaacgattcacatgttcaaaagatttatatgtgtagaagaaagctgtgaagtgtgaagtatattttctattgtagaatggatgaaaatggaataaaaataatatcctttgctaggcagaataaataacttctttaaacaattttacggcatgaagaaatctggaccagtttattaaatgggatttctgccacaaaccttggaagaatcacatcatcttagcccaaggtgaaaactgtgttgcgtaacaaagaacatgactgcgctccacacatacatcattgcccggcgaggcgggacacaagtcaacgacggaacacttgagacaggcctacaactgtgcacggttcagaagcaggtttaagccatacttgctgcagtgagactacatttctgtctaaagaagatgtgtgagttatcaagaccatcctggctaacacggtgaaaccccgtctctactaaaaatacaaaaaattagccaggcatggtggcgggcacctgtagtcccagctactctggaggctgaggcaggagaatggcgtgaacccgggaggcagagcttgcagtgagccgagatcgtgccactgcagtccggcctgggtgacagagcgagactgtctcaaacaaaataaaaataaaaataaaaataaaaaatataaaaaaaaaagtgtgtagcgcctccccctttactcccatgcaagacgtgcctgcttcccctttaccttctgccaggattgtgactttcctgagacctccccagccatgcttcctgtacagcctgcagaactgtgagccaattgaacatcttttctttagaaattacccagtcttaggtagttctttatagcagttcaagaaaggactgatacagactgtgctgtgagcaatcacgtacaagctttggcgtgaatgtgtttttgtttctcttgggtctgtgcctaggagtagaactgcaggttcgtgtggtgactctgtgttcacctttttgggaaattgctggactgtgttccacatggttgcaccatctcacatccttatcaggaaagtatgcatttccttggttcctcatctcagtggttccgatatcttcacatcctctccaatctttacatcatctatctttctcatctagccatcctcacaggtttgagctgatgtctcattgtggtttcgatttgtcccactttttacggaagcc

SEQ ID NO: 921 - DNA, 1532 bp, Homo Sapiens
ttctatttaaaaaatatttttaatttttaaaccttattttaaactaagacacacacactagcctaggcttgcacagagtcaggatcatcgatatcactctcttccacctccacctcttgttccactggaaggtctttaggggcaataacactcatgaagttgtcatctcctaggataataatactttcttcaggattacctcctgaaagacctgcctgagactgttttacagttaactttttaaaaatgtatttactatactgtactttttgtcataattttagagtgttctccttacaatacgagggcacatttgtttcctgcctatgatagtaaagataatgtcttcctctggaacaaagataggacagattttctagcagtaccttacatgattttgagtttcctaagccctggattccacagctgtcccacaaatctattgtgtgtccacttgagttcacttctgcattgccccctatgggacttgtcaggagaggaagcaaaggaagtgcagtgaacataaagctctttgcaggccactgttacataagtaataaagttctttgtctttaacccaggaatgtcatgtcttctactagcatctatgaaactgtaaaacgctaattcattagtttgaaagcagggtaaaatctgaaaatcatttttttgacataggcagattatagtctttctttaatgcctggtaattttgtattaaatcctaaattaagtaatacattgttcagtgctatattaaagtatttcctttaaataatttttgtttgtgaagttttccagttaaatttcttggaatgtgttgtatttgtacatccatcaaggtgatgcccttcagaagactctatagaatacagattacaaactcttctctggttgatggcaactttatgtctagccctgtgtgagctctggaagttgtgtaatctacctcttactattaaatttttcacttgagttcagtggtttccgctgaagtatgtgaatattagtactcaggaaaagactaaaaaggattcctctacatatctccagaatctctctgggcagctaccatctttctagtcccttacccatgaattctagtcgttttcactcagggataccacctgagtgttctgtttcttcaactcagagagaccaccagcctatgtttaggctcccctcctcactctgtgacccacaaacttcttccaggcaatacaaaatggggagaataacaaggctcatttcttttgtttcttttctgtcagggattatgatccctgtgcttctggttgtccaatgtttaaaatccattgttttgtatattttgctcagttttttagttatatacagcagaagagtaaattgagtctccattacactatcattaccaacagtggaagtatacttgcatttttagagtttaaaaaacaattttgttactatagaaatagctttagatatagaaaattgaattatttccaaaaaataaagaatggaagacaggataaggaaaaaaacacaattct

SEQ ID NO: 922 - DNA, 2155 bp, Homo Sapiens
aagactgttaatgtaaagcacgaggtacattgtaggtatatgagaagtgtttgttccatcacctcttatgtcttcctttcttctgtcaaagcacttcctaaaccaaaaaggtctactcagatttctggtgttactgtttttatggttttgtattgttttcagcaatgtgaggaaagtggaatgaacttggactttgaaggcaaactaacctggaatcaaatactggctctgctgtttgcaagtgtgatctttgggtatgcttcctaatctgtgagcttcaacttcctcctctgtaaaccaagatcaaagacaaacagggaaacctacttgtctggtgcccatccccttggcagaacactcctctgaaggatgacagtttggctgtgccagggcagagctgccgacaccaaatgagccttcatagcaactatctgatgaggaactcactggcctacctttccttgacagctggggcctgccagccttgaagcatgactccacaacgcccctacccaaggccatggaggttgctgctgatgagcaagctgttttatatttaatccaggtttctgcttggagaggaagaaggtagaggagccagcgaaggtttgtctgaatgatacttgcagaaaaaacactggtaacagtcacaaaactttgaaaattaaagtgccagcgaggtggcttttggtggccagatgaaagctgttaaccccagcttttacaaatgctgggctttgagtaagaggagagtgtctttctggaaaagtttgagacctcttactattgtagcagcaaaagcatccacggctagtgttttccaagctcactgctacttgttgcagtctagcagtgttgtgtctcctgaaattcctacctttcttgatggatgtaaaagaagtaccaatttattaagctcctagtatgtgccagatgctccatatatgttacttttgatcttcagaaccactcagcaacttactgcttctcctcactcccaattacatagatgatgaaattgaagcagagtagtttgtctaggattacagagctaggagggaccagagttgggattctccctcagttctaatacacagtatgctacatttcctgtcgagtagtaacaaagcttctaagaaatctgagttttcatttgttaaaactgaatttttaagaaatgtagacaggagcactaagtactctatagtttaacgttaataatggtacaagtatataaccagtttctcatgcactggcataacatacttcagagggtacaccagggctggatgaatatctgaacccaaaaatatctgagacaggtctcagttaacttagaaagtttatttttccaattttgaggacatgcacccatgacacagcctcaggtggtcctgacgacatgtgcccaaggtagttagggcaaagcttttttttatacactttagagagacaggagatatcaatcaatatatgtaagatgtacattggttatgtccagaaagacaggacaactaaagcagggagggggcttccaggtcttatgtaggtgagagataaatggttgcattcctttgagtttctgactagcttttccaaaggaggcaatcaaatatgcatttatctcagtgagcagaggggtgactttgaatagaatgggaggcaggtttgccctaaacagttcccagcttgacttttccgtttagcttagtgatgttggggccctgagatttattttcctttcacacttcttccattttctttttaaaaatcttttgaagaaagcattttagaagaaaatgagtctctgctctcatggctaggatagtttattcctacaggggtaggtcccaagttattaggaaagctcatttttagcagattgagaagtctcatgtcctgtgaagagacaatagtaggaggaagggagaaaaacaacaaacaagagaacaatcctagaaaatctatatagaccacattactttgaagtccatacatcagtaggtaggtatgaaagtggcttatgtacctaaatagtttgcttttattttcttctgaagtttaagttgtctagattcagtttgcaggactttagaaagtacagcttagttttcaattatttcgaattaggaaaaatggggtgaggggaaggaaa

SEQ ID NO: 923 - DNA, 18682 bp, Homo Sapiens
cgagtgaggatgagagtgtggatgtggatgtggatgcggatacgggtggagctgctggggctgaggctggggttggggctggagctgcggctgcggctgcggctgcgaggggggctgctgctggaccaggtgctgctgcttctgccgcgtggatttgaccgccaggatggcctgacgattcttgtactgcaccatctgcagcgtgatctcggcgttccagccctggtcttgcgggcaccgaaagtcgatctccttgccctctgccatcaccacagtgaagtacatgtacttgcccttgcgctccacacagtccacggtcttcatgttggagaagtgcagttccttgagcttgaccggcggctcgaggctggcgacagcggggccactgggttgggacggctcggccggcccctgcccgggctgttgttgctgctgctgctgctgctgttgctgctgctgctgctggtgttgcagctgcttgggcgggataagcagcagcccttcctcggtgaggatgcaacactttttcttccagagctgcaacaacccgtcgctgcgcttctccagcacgccctccttcagcgctttgcagccgctactctccagcatcctcccagcataagaggggccgccgcttggctcggcctctccgtttccagccgcgcgggccgggggcagcagcagcagcctcgcgccgtcctcgccccagcggctcccacggccgcctgcccggagcgcgcagaggaggctaacacgcaggaggcagagcggcggcggcggctctgggtcccggcagagggacagccgcgtcctgatgcgccacaaggtcccggagctccgagctgccgggcctctgccgtcctcttgcgagcgctcactgaagggcactggccgggccccctcgcggcgcttttgaatgggccatcttccccacccccgagtgacacccagcggaaaaggcggctcctggcgcccgcaccgcgggggaaagcccagctccaagaggcgctcggcagccggcgcacgcctcattaacttggggcctttccaaagcccgctgcgtccacgccctccagcgtctcttgctccgcctctcgccgcccacttgcttccgcgctcgttcccctggaaggcgacccggacccgagccccggaaactcctctcctctacccagggcgatcgcccaaggagccctggctgcctgactactgccgacgctcacagggcgctgcgaggccatcccccgcgtcccgcttctccccggcccgcgggactctctgctaacagcctcagaaagtgaggacgggggcgcggaggcgggggcagcctccaggcagtgctgcctctcggttcttgggaattagcccgggggattcgcgctgggctccgagagcccgcagaaccagcgtcgtgtcctgggcgagctgggaggccggggccgagtcccgcgagtcccgcgagtgtgcctcccccggacgcctaggtaaacaactgagcgcacagaggccgagaggacatcgtgtcttcccacgcatattcgctcacggtcactaagtagctcttcttggaaagagggcgattgttaaagcaatagtgcgactgtcgggcttgccacgggtggagagaggcggacccacgtcaggtcgcatctcgcctgcttttctcgaccccgaccgcaggcgctaacccgtcttcggctttcttcttgacccgtacggtttgcaacgtctcttaaaacagtaactcaactctctacaaaccggggtaatatccggtgctgagatcccacactgcaaggcgcagttccaaacgtctggtcggcctcgcaggtccctctttccaaggcctagccagatcttggttttggaatctcatttatctgtgacctggggaatgcaatacccccagctccctcctactcctacatttaaacaatgcctatagaagccgcttcctgggaagtaaggcataaccgagacctagcctcccggtagggaagttcatccgtttagtaaacagccccaactacgtgcggaccctcacggggatacgaagaattcaaccagggctggacaagtcagagtgggccaaggacaagtgagcattccagagaatttctacatgaccagctgttcattcttttaagaggatgacattcttcagctcatctggaaaggatacttcctttaagtctgttattcacagtctccaagggcaggtgtagttgggaaagacatttcatatggaaaaacaaacttgatagggtaaaaaaaaaaaaaatgagatgtaatctggaggcccaagtcattttcttaggagaaactcaaatgtgtttggtgttatctaaccttctgcagtttatcagtctgaaacaaatgcattctattctcatttgaaaatgtctgaacagccaccaattttcaaaatcacccatttaactagagactttaaagcccagaatttgcagttacgtatttcagaatgatttagtaattttgtgagcagctcagaggttaagtctacaatgtctgactacggtgcattattgaaaatatcagtagtgtaaggatcccgtagattggtgataactttgctcttgttatttcaacagttaccaccaacagttggtgacttaacaaattaagagcatagttgccatatgctcatatttggcaaatatgtcaaaatggccatatttgccaatttttaagacaataaattcacagaaaatgcattacagaaaataacttaaaaaaaaaaaaaacaacttttgggccaggcatggtggttcacacctgtaataccaacactctaggaggctgaggtgagaggatcccttgagcccaggagtttgaaaccaacctgggctacatggcaaggcctccctctacaaatgtaaaaaaaaaattagccaggtgtggtggcatgcgccatgtagccccagctacttgggaggctgaggtggaggactgtttgagcccagaagttcaaggttgcaggagctaggatcgcaccactatacaagcctgggtggcagcaagaccctgtttaaaaaaaaaaaaaaattcagctgtatatgcaatgaaaacctacaagtcactgaaaagttactgaagtttagaaaactagccaacaaaatcattgctttggtaaacaaatttgaaatggctaattgaaagtacattttacagctggcaatataaagttatctatcagcagcactggacagttcattttcttctcttggataaagtttatcacttggcttcaaggacatcactcagttttcctttacatctccagtgtctcctctatgaggtgctttctcttctctccaaacttttaatgttggaatgccccaagtctttgtctttggctctcttctttatctacactcattcccttgttgatatccagtctcatcacttttaataacatctatatgccagagtcccaaatttatacccccaacttatatccaactgcttactgccgaagaataaaacactgaagttaaaaaataataaacataccaggcaagggaacacttactagtaaagccatttactgagtagttcactaaaggtttaagtctgaggggattttaggtcataggaaaaaaaaaaaaaaactgaaaaagaacactcggatggtcagaggagtctgtaattcatacacaataggttttaacaaattcctacatggaactgctccagtttataggttagaattaactatagtgaaaaacagccttcagtttttatcaattccaggccagtgagtgctactataagttgaaaattctccatttacacttctctacagtacggcttgtgtagtctaagaaatcaaacatgtgaatgagctcccaaactattttcctcactctaacctactctacctgcagccccctttctcagttgacagcaatcctctgtacagatgctcaaactaaaaaccgtagatcagtactgcccttacaccaggccaggaaaggcccttatccaaggccctgagctttaggattgagtgctttagagtcaagatgacatgtcaatctagagagcatactcattctgcactacactctaggtactcaagaccccaaataccctgcccagaatagccccagctgttccaggaaatgcattacatcatcattgcatgcactgatgtgttagggggatagggcagttcgaatatactggttatggcatccaagtaaatgtgcaggaggccccttgccatacagttcagagccggggtgggaagaaaaggaaggtggctcatgggctgagggtcagctctgcccgcaagttatattctggcataaatacaaacctggcttcccagttctaatgaaagtttgtcaagacaggcacattgggcatattttcattaaacagtacttttaaatatttaaacatacggtatctccattgtactcttgccccaggccttcaagtgtgtagaatcatgcctgccttgtagtaatttttttctctcccaatatttaatctacacatttagtcaggaaatcctactggttaggccttcaactacatctggattctgtccacttccttcattaccaccctgatccaaatcaccatcatatccccccactggattactatgatggcctcctaacttgtctccctgattctatccttgttatctattttcagcatagcacccaaagttatctccatcactttcttcaagtcttggctcaacaggcctatcctgatcactctcaaatggtagccactcaattccccttaatttttcccatagcatatattatcttctaacatgctactcaataatttattgtacctattgcttatttctgttccccttcccactagaatagtatgcaagctattcaagagggcaaggaccattgtttctgatgtgtcccaatcacctagaaaaagtcttgataccaagtagatgctcaacataggtagaaatcttgaattgaattagaagtccatacccatcataaaaagaatatcaattttttcaaatgcttttgacagatttttcatgatgcatcctactttttaaaacttgagatgtaaggacttgaaatttgccctacaaacatatctctggtatactttttaaatggataactacatgctaggcctctctgaatcttaaatgcttttatagtcagacatctaaaataaatcccacaaaccttttcccaagcaacatgcaatttaatatcatgagaggtgtttatataaactagtatcctactgttttctagtaagagtatttagaagcatgagaaacacagtaatggaactgagttggtaagtttcttacttggcagttacatagtcaaacacttgactaaaagtccattaatcaatactggcttaaagacatgtaacagaacttggaaagttattaagtgtttaattcataatgattacaaaattctgatctgtaaaccaatttgcaatatacagtagaaactcatgacaatgatcattattaaagatttggatagaccaaaggtcaaacatctttcaagaaaaagttaaagcccagtaaattatgaacatgtcacgttaccctcatcagggtataaaagataaccaaggctgggcgcggtggctcacgcctgtaatcccaacactttgggaggctgaggcaggcggattgcctgaggtcaggagctcgacacaagtctggccaacatggtgaaaccccgtctctactaaaaatacaaaaaaaaaaaaaacccacagcgcctgtaatcccagctactcgggaggctgaggcaggagaattgcttgagccagggaggtgaaggttacagtgagccaagatcacgccactgcactccagcctgggcaacagagcgagaatctgtctcaaaataaataattaaataaataaacaaatagtctcacagagtgcagtttagacttcttagccttatttcatctttgaagtactattcagaagaaatattctagattctagtttccaaaagtccttgagttgaaaacgttaagtattaacacagaactatccagacttcttaggtgggtgtccagagctgccttccttttcgccttagtagttgatgaactgatgcctcctagtgaccaatctgtgtaacagcttaaagcaagtgctttataatgagtgcttagcgcttttttttaactgtagtacaaacacaattgtggatccaagcaccgtccatcagctgtctccgtcctttctgttctgccagcagcctaattcagttctctcatctaagttcttgggtggcccaatcacctgatccatactcatacacatggccttcagttttactcttaaaacatgacagaaaacttctattcgcctccaattgtatacattccaattccttacccttgcatgacaagccctccacagaatgggtcctacttattttgactcgttccactcaaccttgagcgagtgccagtcatacatctccttgtcctcgcagcctccaatttaccttcccaaatcctctgtaaacctttcattcttcaaagccctattcaaatcccagatttcctctggctgagttaattccttcctaatcacttcaaactctgatgagtagttatccaattttcacgtctacttcactaaatatccaagatcctggatgagtgttttcgccattgtacctaacggagagctgattgacagcacttaaactgaggggaaatgactaatgttttgtctggaaatgtattgatattattcaaaatgggcaagcaggctatcttattgagtattaacaagtaaccaggaagtctgattatttgtaaacttgttatggtaatattagctttgaagtgacaaacgaaaatatggaactggatgaaatggagcagagaggaaggtaatccaatgaaggaggctgagagaaccagtattatgttgtcacaaaactgcaatcactcaaaagtgttgatattctggctctgggtctctggggtgacaagataccccagtaactaagagtggaagcaatcctctgtccccactgaagagcccaagaacacctaccacctttcctaagtatgcttctactctgaaacccggtaaatgcaacccgttgtttgcaactcaaatatgtaactgacagtcacttgggcaaatacctccatttaaggaactaaattccaaggatatttccctcttttgctgtcatttttccattgccacaaaacacacagcctgaggacataggctgttcaatttgatcactattgatctctgtaagaaaaaaaaatccagtaatgggcaaatacctttcttaggtgatagaggacatatagcagtgagtgtagacaattcctcccaaaaacatgagaataaagaaggtggtagtggtgttactttagaagaacaactcaggcttcagagagggtaagtttcattacagacaaggtaatctaagagtaaaagggataaaagaattctgtggggtagccagactcagaaaggtggaataacacttttacaagaagataaaacccaggaaatgtttatggcaagcttgtatgttgccactaaacctaccagaaaaagaaatcccattagaaccgcccccatcacaataactacctaagtaaatcattgttgagtaacaatgagcaccccttaaacatgtcagaaaccagaaagtttttgtttctaatgagatttcatttacacttttaagtcattgtctcaacctaatttgtgcatgcatggttctgagaaaggttatcatgcaaaatgaaataaaaagccttgggcaaagcaggactccaatcataattaatccttttgggccgtatttaaagaaaattacttttcttagccctgttcacttatttctaaaatgtagttatttgctttatgttccaggatatccttgatcaaataatccttttctaaatcaacttatttcgacatatgtggccaatgtggctgtcatcctaacctcccttggcattcacacccagctctattttatttactatcctacttttagcactgtgagcataaaccataggttcttctttttacaggagaggttggatgccagtagcctttagcctccttcagcccatcctgtaccttgaacctggacatgatgtatagagccccagcaaccacttgataataaaccaacttgccaaagacaaaaagtagaatgaaagtctgcctgagaaccatgaagctcccatatcagtcccagagtctgtctaagcctaagagaaaaacctatataagccacattgtattggggctgtgttatacaacattataataaatacaaactcttcagggcaggggagagaaaaaggaaagattatctgaatattgtttaaaatgaaatctagattaactctggtctctaaaatatttcatctctgaaagctctagcctaaagaacatgcttatttaaccactagttgtgtgacagaaatatctacaaggcagtgcaaagtgtagggccatccaaatgctggctccaacacaactcaactgtgtcattgttaaagttacttaacttccatccttatgcataaaaagggaattaatattctcaatcaagtatgattaaggcattatttttattatcttaatgttaaacgaacacttagttctccccaaattgctgattaatactgtaaactgaaatcccactagtttaaaactatacatggaatagcaatgaagtttttctcgaaacctctcagtctagttacattatacccaacttttgaaaacacgtgtacttaagggtcaccttatacataccacttgaggttcctttactaatcaagcttgacatttttgtctgagggagttcactacgttatagcttgaattatagctggaaatcaattgtccagctataattcaagtaaaagattccaaaatgatggggaaaagcatatgtttttctccctgaacaggcatacaatatgtaatttaagctttgatgtctttggtcattttggaaaacgactgcaacaaactaagcccagtcagaaaaattttgcttgttttaagccattaagttttggaggttgttttgttatgcagtactaggtaactgcaactattgatatgccttcccttgactttaaaaaacaactaagttgactcttgaatatcaaatttgaactaagagggtccacttacaggtttacttctgtctctactacccctgtgacagcaagacccccctcctcctcagctattcatgaaggcagtgaggattgagactgttataatccagttccacctgagagtaaatatacatacacatacatatacatacacacacacacacacacagacagtttcattctgttgctcaggttggagtgcagtggcactatctcggctcactgcaacctccacctcccgagttcagtcaattcttgtgggctcactgcaacctccacctccagagttcaatcaattcttgtgcctcagcctcctgagtagcttggactacaggcacacaccactaccacctacagctaagttttgtatttttagtagaggcagggtttctccatattagccaggctggtctcgaacttgtaacctcaagtcactggcccgcctcagcctcccaaagtgttgggattacaggcatgagccaccacacctggccataatatatttccgattgcttaacattttctctagcttactttttacagtatataatacacataacatacaaagtgtgtgttaaatgacttattggtaaagtttccacagtaggctgtcaagttttgggggaatcagcttatacatagatttgactgaaggaagctggggcccctagcccctgcattatgaaagagctaactgtatacacaatccagctttgtttcattggttttctcaatctacaggaatatgacaactacaaaagaccttagagactgaactactgagaatcaatcattcgacttgctacacagtcccacacaggattatggttggtacattgaatgggtctagataaatcctaactgacctatacatccaaaacttttctgtacacttaccaagttccaagcacagtgctggaaattaggaaactcattaataagcaagtgtttctagagtattttgaactggttcaaaaccagttcagatttatagaaccaaagagtaggtactgatgaaaaggagatcctatgttgaactagtaaaacacatgcacaaaagcccagtggcagaagtaaaagaaaaggcagccaagcagagctgaaatagtgcaaatgcaggttaaatacagtgggctattcatctccaagttgccgtgaagtggctaagtccactcaccaagccaaatgaatagcaaagacaacagttccagcctccagttttgaaatccatagttaagtgcggcagctcccacttgtaagcatagcacctcaggaggttgaggtgagacaaccacttgagcccaggagttagacactagtccaggcaacatagtgagaatcatctcaaagataataaaaataaaactttgttgactggcctaatccaagtctaaaatcacatctgatctcaagacagacacccatgtcacatccacaccagtgtcaaggctccaggtaaatgttgggagatagaagggataacctgaataatgacaatttgggtattctgaagcatgagaaatccaaatatatagcgatacctcatttcgttttaccctagatcatttctgggttctgccaaaggccaaagaaagtaaacagcatatgaaaacacatgtattaaaataaaacaagaaaggaatgagatgagattttcaaacctagctcactttaggttaaggtcaattttttttttgttttttacacataaaatcttcaaaacgaggcatatgtttaattttattatccagtcttagtctcagtgttcttatgtacactgagtaatgcatcccttacacctaggaggaattttgcctttgaaccaagaaaaccccaactagttcagaaataaagttctaaaaccaatttaaaaagtaatcccaatcacaaattttaggttttcttatgtttaggaagtgctcataggctctaagtacttttgtttccttattaatgttcaccacgatctttcgcaatacagatgaaaagactgatgctgaaccaacaggtggtagacagactctaaagcctgtgtttaaagacactacccaaagacactacttgtattctcacacatatccattaaaatttggtagcagagacatttgtttaggggctgaaaagttttagtctaaaattagatctccatttttattcatggattcttattcctatagagcaacctcatctactttcctagttggatcaactgattccacttatttgaaaataattacaaatacggacggcagtagcagtaggaaaaataacattgtttgattcaacttcaaagtatccactgtgcgttcagtttttatgatacatgtacaaattttctttcacctgaaaggccctagaaataccctgtaaagagcatattcagcaactggacttaagtttctaagtaatactccctattctaagaagccagcaatccttggagaaatggcccattccagggctgaaatagaaaacgcctgtaagactagaaaactttttgagccaaaaagtatgttgatcagagtaaagaatataccggaattctttcaactattttcagagttgaaggaaagctgtaatattgataagttaccccaaaacaccaatctggagtttgactaaggggattcactgcagataaaactttattcagcaatttttttaaataaagcttttgttcttggctaagtaaattatcttaacagctaacagcgtcttgttcactgctgctgccacgtcatttaacttactttttcagttgcatatatatgaccctgaagcctttactggcccctggggcccacctacctcaaatgttctgaccttcaaatggctgacttggtctatcaatcatgtcttcctttaaaaattatctttcagccaggtgcagtggctaacgtctgtaatcccagcactttgggagaccaagatgggtggattacctgagtccaggagttcgaaaccagcctggccaacatggtgaaacacctctcaacaaatgtaaaaattagctgggcgtggtggcacgtgcctgtgataccagctactcgagaggctgattgcagcagtacactccaacctgggcaaatgaagtaagaccctgtctcagaaaaaaaaaaaaaaaaaaaaatttctacatggaatggtcatcctcatcctcacttgaaatactcttgtaacaggtggttccagtgttttaaacccattaagaggacttccacagctaaactttctatggactggccacttgtatttctacctgtatttccaggtatctcaattccttgaatgtagcctcaattgttctgttctgggacctttgcctgtatttcctcctgttcctccacctgaactgctcaccgttcagaggttcttcctctcacttcacaaattcctacagattctcaaaatctcagctaaaagctcatacaaattttgagccttctggtagcaactattttacaacctcatgaaatttaccagagccgcaattgcctaatacattatgaatgataaaattatgaataagaccttcaactctggatatgagatctgtcgacttctggcactcacgtttaatcacacattcctagttccttctttttggctttaagtttaaaacatgtaagaaactggctgggcgtggtggctcatgcttgtaatcccagcacttttgagaggccagcactttgagaggctgaggtgggaggatcactggaggtcaggaggtcgagaccagcctggccaacatggtgaaaacccatctctactaaaagtacaaaaatcagctgggctcagtggcacacgcctgtaatcccgactacttggaatgctgaggcacgagaatcgcttgaacccgggagatgacagctgtagtgagccgagatcatgccactgcactccagcctgggcaacagagcaagactctatctcaaaaataaaaataaatggataaaacatgtaagaaactaaaaagcaatgcttttatgtaatattttatcctgggtttcaaaataataaaactcagtttgttctaggatccacaaaacttaaaatgcccaatttcccataggaaaattaaacaaccagactgacttatttcccgccagtaatctattatttctaaataccccatttcttcttttattcagactcttggcttgaggatgacatggtcgggcctcaataagcccactgtaagtcaaaaatatcataagtagaagatgtgtttaatactccaataaactcataaagctgaagtcttaagtcaaaccattataagtcagggactgtctgtactaagattttagtgaataacttaatttttgtaaactggaaaacctgacaatatgatgtcaaaaggaagaaacacaagatacaaagcatactgtatttttgaaaatatacatcaatcaaaatttcttatgaatacttatccttgagtaaaataatttcatataccaacaaggatgtttccatttctgtaaagtcatgtaagtgatcctcaatcagtccaagaacttggctttttatccaggttatattttaatatctggagttttaatccagcatacaaaaatcaccagtatacatctattaagttaactgcagtattatttcaccatcaccatttacatgtacttttcaggtatcagagacttagtgctttaagtagcaaattacctaaattatgaacacatatttccaaaaacaaaatcaagctcataattaccaagtatatatgtacagtgcagattaaaaaaaaactgaattagcacatatttctcttttctaaagctcctatgaagaacttacactcttctgcactaccaatctattctgtacatttaaaataacatttgttttgatttaaagtcaaaaatataaaggcttaaatttttgtaagactaacccataaaaaaggactccaattttaaaccaatccctgaaaccaaagcattcaaatatttgaatattagttcaatatttctacatagcacgataagattttcagttacttcaagttttgtctttatttttaataatgggaatggcctacaattacaataaacaattaattcagttattttaggggccttaccatatcattaacctattcacacaacaaaaatatttttatgaaagttaatatatcctttcctgattaagtgtgctaaaacagaaatagaggtagaatcccatttttcttaagtaccactctacaagccagttccacacaattaaggtatttttgcaatctaaaatagtgatgctaatactgcttcagtaagctagatttactaatttaagaatcctaagaaattatatatgtggctttcagacatccatgttaaactatcaacttgtggaatttgtggaacacttaccctacttgagtgaccataaagcaaacaactctaaaattttttcatatcagttttctttataagtgattatatgatatttcaccatttctaacaggaaaaaatgagacttacttggcagtgtgcatgggctgctggaaactacaatcagagtgtaaagacaaatctcaaaaatgtttgtagataactcagaataataacccagaatataacctatcaggaactatggaattccattttagtcttcaaataataaactccacttagcagggattgtgaggttgctcttaaaattatatatttacagaacatagtggcctcagcacaaaatagctccctctagacatcactactctccactcttcaaaaaaaaagtatatacattcatttaaaaaaaaacacccaaaatatcaccagtacattttataaaattaaatccaaattttattaaggatttcaggttacatacttcaaatttctagaatggaatggaatcattttggaactggaaaaatggcataaacactgacgtcccttaaaacttcaattttataaagaaaattcttctgcaaaccacatcccctttatgtaacaagactaggtattatctacaccttcactttggcaatagctatttcctaaagaatgaaaaagatgattttgctacttcagttcattaaaaatgggattctatctttgaagttcagaaaaagctgcatttcgatgaactatggttaaaaaaaaaaagcacatagtgtctaatcaaagcaaaggaaatcattttgaaaataaagaaaaaaagctattataattggttaaggatttccagtagtaagttaaaatctcaggagaggaatggatagcactacaaacaatgtgttcacattccaagaccttaacactaacttctcagaaaggaagttttcattacctctaaaaatcaattcaatgtaattttattaagagcaggaaatctagaccttcctctaatgacaatccaataatccaccctcactgtcaaaaaaaagttcaaccccaaaattaacagtaattagcctgaggtattgtaaatgtggctctacagtctgaaatttaatggcatcttttgtcaaaaatagtcttatttccactttaagtctcatgactacaatactatagtgctatccctgtagtatttacaatacagtcatcaaaaatatctgaaaacaaatcttggaccttgtgaaatagtgcatccctccacttctataaaaataggagccacacaaagatctaaaaagagtgctgactgcccagatccagaacagaggtacttaacacctttgttttccagtttagttatcaaagcgtggtgtgaacaaaatgcttagtgtcacactggcattacaaataggcccaaaattttgagcttttaacaagattgagaaacattatatgagatttaactcaatatgccttaacacatccatgaggtagttaggtaaacagtactacccattttaattacacagtaaacagaagcacgggtaagtgacatactcatactttaagcaataagaattagaagaaaccatagaagcttggggccttctctctagctctaacccaaagaaaatgaatttttttttttttttttaaaagaaaacagcatcaatcacttaagattttcttcctcttttttttttttttttacacttgcttattagtatagcatctcgttccaaagctggtaccttttcttcaacaatgtgttaaaaactgagtataacccttaattcaaggtaggcctctacttctacctgaattggtacaaaattaagacattatcttgtaagaactaaaattgtatttgaaatttttattttagctgcaaaaacaaaaacaagcaaacaaacaacaaataacttgaaaataggcttgtcaaatgatgtaaattcatcctttccagggaagcagaaggtagaccctaccacaaagaaaagatgcttagttaatggaggttaaatttaaaaatacagttaaattcaggctaacttctgaaaatcccgttttattcacctcactgtggtaccagtaactatactgagtcaggttactttacagttaactatgtcacctaaaacacaataatccattaacactctaataacagttattgggtgtggtcatactggaaattcttaaccatatagttgtcttgccaattttttttttaaacaataaattgtcttagtataagtcactgcatttctgtaacaaagtaatgaaaggcacagctaatccaagcggacttaaccctattcaacaaccagctgaaaaaatactttggttcttcaaggaaaaaattacaaaaaaaaaaaaaaggtatttcctttaacagttgttaattttcatagctgtactccaagagctacataaaaatattccagaagaaccaaattatgtagcaatgaatgaacatgcgtgacagaatttgtgcattcaacatagctggcagaaaaactagttaaaatgctaggtagaacaaattggtctttaaaatatcagtttcctgtcctttaaaaaaaaattacctagtctaccaagaaaatacaaaaacataaggctgtaagtaaataagagttgtgtttaggctattacagtgcaggttatcctcaaggccacatacatcctgcttcactgctgcttgcactctgctgggttttgatccttctgttaaaggaaaacaacaagtcaatctatcttcttctacctgcttcagtgaatttctcaatagtaattactgccttaattataacagtagctcactgttgtcaaaagaaatggtataggacaatggtggtaaattatttattttattagcaagtcactgaaatgctaaaatcaagctcaaactttacactgtagaattaactccataaaatgtgacacacgctaaaccataatcttaaaaaaataaagttaccaagcaatttatgttagttatattaccaatcagctttgtttttgctaatcctaatataacaaattctcaggaataatagactaggactctcagggactgagtaagagtagttggaaggatctaacaaactgcactgctccccagttcccgaacactcctacaaccagatcttttaaaaacctttattttctaatgcttaaaaactgttacaaatcgtcccattaaaatagaatcctagggttcactgtacctgaaactataaaaagcacgaagtccaaacaaaaaacaatgttttttagaaaaacgtccactgaaattatgtgtactgttcacaatgccagtgggactgaaaaaacaaagttatccagtcaataggctttatttattaaagactttaacggagagaaacttgatattcaaaaacaccaactcttactttagctatcttaaatttaatagaaagcagcactaattttgctcacctttgggtcatagtctggatcattttcctcatctccttcttcttccccttcctatattaaagttcaaaatgcatccatgaagtatgtacatagtaggtaaactggctcataatgtagggaaaatttaatacaagttactctacggatcaacagattttcatgattacagactttgatgataatacaatttaatttgaaagcttctaatatgaaaaatttcccaacacaacttgagacatccagacagcttttattgaaaatagttactgcagccaacgttggaaaagtttactgcagcttttgacttcttcaaagagctgataaccctgcagcagaacaaaattatttgaaataaaaaaatgttgctgagttttgcaatttatttattgaaaccttatacatacattgtttggctgtagaattctaaaatcatgttttccaaaatgtttttatcccaaatcacagaatgattatagcaaaggaatacataagtcattcaatttgcttctcaatgtgttaaccacagagaattatttgctcatttggtaaacattacctcatccgcttcttcaccttcttcatcatactgaaaaggaaaaacagcgttaagtgttgagtgaatgtaacacacatttcagagtagcatcagtaac

SEQ ID NO: 924 - DNA, 2391 bp, Homo Sapiens
ctcgccaccttccctggaactgcagcctggagggtgcttccccagccctgcttcctgaagcttccaagctcatgcgccgagacagtagctccggccaccaagatccacccctgcgtgtgtggcgtgtgtctgtgtgtgtgtatgcatatgtatgtacaggagctctaactgcaggaccgtcctcctcatgggtgacagggagctcaccagtcactctgggttgggaactcctagcaacattttcccacaagtaagatcagattaaagtaaagatcaggaagggtcaagagagaaaaacagccataaaacggtgggttgggaactcccgaaaggaccttcctcacacaactggcccagaggccgtgagtcacggaagacagctgcatctcatctggatcgaagagtcgatgctggtggcggattgtgtgtggcacgagttccctgacactcgctcaggacatgtcccgtggatagcttcctcctgaggaaggcaggcaagccgtccacccacccacgctcctgcacgccttgtgtcagagatcagctgtcaaatctgacacgcatctacggcgctggcgccaaggcctcagcctctcacgctccacgtcccttggcctctctggttgagctcagctgggacagccccctgaccccacactcacctacccccactcctggcccggcacagctctggccccatcgtgccacaagcaggtgggggataaagggagaggacacgtcaccaatatcaaagtcgagcacgtggcgggagcgtctgtctcatgcacgggagggctgggctcggggaagcagagaggagcgaaaaacgggatgcaggcaggaaccatggcccggaccctcagagccggagagcagccacgggccctggagtcaccttggcttcccctgcagagggatacacaccctggaggagattctgcctttcctacaacacagtgaaggccattaaaagctctggaggagggggaggggctacctgcggggacaccagatgacacgaagccctggggtttggcttcagtgaacttcttctcccagtgggaggaataccccaccactacacacacacatgcacgtgcacacacgcacatatacacacacacacacacacacacacacattcttgcacgagtgaaaggggatgtcccttacatcctttgacggcaaaagccctcaactgggttggggttccaaacacccatcagagccgcgtgaccctactggatttctcggtggcagcctgggctctaagcagatgagcttctgaaagccccgtactccctcggccagcttcgaacagccatttaaggttgtctgggtccaggaaaaaggccatctttggatttgctgggggccccagatcttagtaggaaggaagaaaagaacctcgcaaatccctccagtttcgtgggctcctccaggtgggggcagccaggtctgcagatacagagggaaggaagcctggaaatgaatgctgatcccaggggatggggaggagtcaaaagcatccccaaagtgcactgtttgggagtcctagacccgggacaggtgaagggcacctgtcttcagcctttaatgatctagggcagccattctctctgaaggctgagggagcctggaggggcaggagaggcaaggcaggtccctgtggtcagagagcgccttctggatacagccacggtttgctttcattatgcaaggcacagaggaatgtgatgctagacacagcactaccgccgagacaggagcgagacagtgctgtgggatgcccagggttaaaaaaagttgccgcggtggctcacgcctgtaatcccagcactttgagaggccgaggtgggcagatcacctgaggtcaggagtttgagaccagtctggccaacatagtgaaaccccatctctactaaaaatacaaaaataagctgggcgtggtggtgagcacctgtaatcccagctactcgggaggctgaggcaggagaatcacttgaacccaggaggcggaggttgcagtgagccgagatcgcaccactgcactcgaacctgggcgtcagagcgagattctgtttaaaaaaaaaaaaaaaaaaaagttgcagggaaactgcaaagaaggtggggaaaggacactcctacacactgtgggtgtgtgttgaagggggacagaccctgaactggggcagccttctaggtgtgcaggtacaacgaggcagtccctgtccatgtgcaaaacgcccagcaatcacccagcaacagcccttccagggctcttgtctaccaaaccctataggcctccacagggacatgaggatgaagatgctggggacagcatgagtcccacctcatctacaccacggagctccatgcagcccctccaaa

SEQ ID NO: 925 - DNA, 2693 bp, Homo Sapiens
ctggttggctgagcctggggctttgtcaggcctgtgctacagtctgacttctcccttttcctgatcctctttccttccccttcccttcagaagacttgatccctaataaacatcttgcaccccaaactccatctcagagtctgcatttggggaaccctgccctttgagaccagcctggccaacacggtgaaacagtgtctctatcaaaaatacaaaatatgccaggagtggtggtgcacacctgtagtcccagctactcaggaactgagaatacatgtgtgtgcattcttcattctaaaattatctcagctttaatttcctatacagtaaatattgatagatatagctgacctagcaaaagttctttgaggtccttaatgactttacaagtgtaaaagtgtcctgagaccaaaaatgtttgagaaccgctgtaaaaccattgggtttgggggtaatttgtataagacgtctatacaaatataagcatgtaatcaaaatgttaatagtgatcatctgtggatgatgggattatgggaaatgtgtatagagatttttcccttttttatactttatctgtattttccaactttttataagaaatgttttgcttatatgagaaatatagctttaagataaagttgactgatctgtataatctttagaaagaagagagaaacctctcttgctctatgggaaggtcgctcctgtgggaaggtcttggcagaaggaaataaacatgttgaaggccattctctgtagccctggtcacctccatccagcgaaagtagcaaagggaccctgaatttccacctcctccacttctagagggcagtttggtcagctttctctcgctgtcctcttttcaaataagaaaaacaaggactctagttcccaatgtaaggatccactcagagaagcccccaaacaagaagtgagcaagagccattttctattcctgcctgtgaagaacctctagaagttgactgcattccagcagcagttgcctagggaacaccagtgacaaaaaggagccgtgaggacacactaaataactttagcaactatttgcatttggcagatgtagccaagggcagggccctgcctggctccctgtggaagccgcaggagccccacaaggaagggggggccactggaacagtcataggggagcagggaggtgggtgaagaagtgagggccttaactctttcattgcccctccccaagcctgctggggcaagggtttgtcccagaagagatctcctgggctttgtggaaaccccagagaaagtgcagcctcttccgggaactgggtcctcccacacacccacagcctacagccccccacccacccaccatgccccccagtcttgcttctgcttccgccaccagggaaggcaggtgacaggatgggctgtgagctccaggctcagccttgctgtggcagctaattgggatggtttttacctgccaggtgaaaagtctgcctggggaggggcagtcagctctctgtcaaccctgcttcctctctgtctgccagctctcattaggactaagccagtcccatggagccccaagaggagaagaggccaatgagccaagccgttcctgcctgtggcctggaaatcagagctgcttcgagcaagctctgcgcgggctctttaaggtgagccccagtgcctgggcttcccactctctgggtgggatggagacgagaccgaaaatagaaagcagcagaggcccagaccaagcctggcttttctcactgcccccttcaaaaagttctgctcagatcagatgatatcagaaatgattggcgcctttatttcccccctttgcttctagtcccccaccccctttccagtttgaccacatctgtaggctctgttgaaacagagccaacataaacaaaaacaaactgaaacccagcagccagcgagggcgggatgtgccacccatctgggcaggccacgtgcagggctgaggactgccaaggcacacctcctgctggtaaaaggcaccgtgtggagtaattaacctccagggcttggtgagtgaaaagcaccatgtaaccatgctgggtaattgaagaggaagagaggagcgctctcccgagtgaacattcaaatgtgtgcagcttgctggaccctctcaagcaggatggcagtcggttggccatgccccataatgtggctgtcatcatttgtcttccaaattgttgcccaatcagaatggcttcgggacccttcggcttctatgtatgcatatgtataaagagacttcttaaagccatgcaggatttgttgttttattttttagtgagaatgtccagagctggcgaaagcagaagagaaataaacactccggtagtctgctggtgaggatgacaactggtcgacatttctagaggccagttccggctccaacactgcttgcgtgtatctgtgaaagagacccaggtgccatgaggctaggaaggctgggatttcgcagctctttgcactgaaactgctgtttccttgctggtgctgctggagatgaaaatccaccatcctccagaaacccaaatctctcctggcaccagctcccggtggccagcaagtcctatcatcaactggaagaaatgaatgacatgctctccgcatcacactcacttagaggggtcacacagcaaagctgcttaagcccctgaagc

SEQ ID NO: 926 - DNA, 2105 bp, Homo Sapiens
tagcagccttgtgggaaatattaaagaaaatatgcaccaaggccatctaataataggaccatgttttgaaagatgtttacatggtggtgcttcaggaaatggggctttgcttttaaggtttttgagtatggagaaatagtatcccagctctgcaataggaagatcaacttgcaaacagtttaaataggctggtaggggacagtctgatcatgaaaaagcaactaggaagctattataagagattgaaccacaatggaggcagcaggaacttaaatttcttttttcatttatacttgcctttcaactttttgtagttgcaacatgtactttcttattgaatcctacctctgtcaaagtggaaactttgataactcaaattgtcccaagtataaagtgatttcaaagttttctcatagtcgtcttgtgtttttcacaaaaaccaatttctataatatacttttaaaaaattgttaatcatttctgttcaacatttcttcagtctggatcttatccaatgtcttacgctcctcgttaaacaacaaaaaaaaaaaaaaaagaaaaagaaaaagaaactcacatctaagattaagttcagtaaaattttgattaatcagaaaatgctaggaatggcgttttcgttacttaacagtaacacttttgtggtttcagggtagtcaatgaaaatattttcaaaatatatgtctatatctataactggatataattaactcaatttaacatttatttgatgatccacaattttgaagcctttgaatgtttgacttcaagcagcaagaaagatggagtgatagtgggaaggtaaaggtgaagtggtactctgagggatcagtggttgagagggaagaggtaggaagaagagcttcacagaggaaaaggatcaaatccttattgttccatattatagatgtaagttactgaattctaagaaaatgctgatacttattttaaaaactgtatccctaatcttttttcctcatcagttccttatttctcataaaagtaaaattagaataaaagatccatttctttaagaattatggtgagattgattttagtatgttatgtaacgtagcaagtgatactgagtgcagggcattttaagtaacagctctttcattatatctcagctaatttattcaacaactattgaatgagtactgttatatgttaaacaccattgtaggtgcatgtgatatagctgtgaacaaaacatcaagaagctttgccctctcttgttgagacagacagacactataaataaggagaatacatagtatatagtttttagaatacatagcatttttggtagtgaaaattaccatggaggaaaggagtaccagggtaaggtggggttatgaagaagatcttactgctaatatgacatcaaattaaggcttgaagagagcaatcaagtcttatagcaactggggggaaaaggttctgaggtaggaatatgtctgataggtttcaggaatgtaaagcagctagtgaagctagaaaagaaggaagaggaagagaagtagcagttgagatcaaagagctaaagggaggccttgtaaactattgtaatgactgctttttattctgagtaacacaccactggagggttttagatgaagtgatctgatttttttcaaactaacaatttaattttaatattaccatatagttaatatacagtaaattcactcctgttagcacacagtcctgagcatgcacagttgtgtaaccaccaatacaaagtataaaacagtatcattatttcagaaaatcttcccatccccatttgtagccaactttattccattctctgcccaaccacggtcttctgtcttttttgattgttgcagaatgtcatataaatggaattgtatcgtacgtagcatttccatctggcttctttcactagcagagtacgttggatgttcatccatgttgtgtgtatcagtagtttgtctctattgctgaggagtattccattgtatgaatgtaccactgtgtgtttatgcatttcttgttcagttgagggacatttgaattgtttcaaaacttggtgattattaataaagccactataaatgtcc

SEQ ID NO: 927 - DNA, 6557 bp, Homo Sapiens
cggggcggggcggggcggggctgggacccggggccgcaggggcggggaaggaggccgcaggctccggggtgccctggctcagcgcagaaaggacgccgcgcacaggtacagcccaggccgcccgggagccgcggtgggccgcggtgggactgcgtttctccacctgtctgcggtcccggcagatgctcccgcgaaactcactttctcacctgcgcctgtcacgccctgggcgcccacagcttccccctccttcccgttctctcaacctgcgctggccggaggaccgttttcacactcagagctcccagaaagatcccgggaaggctcactgtcttctgcagggaaagtgcagctgtaactggccccatccctactttcaggtacactattggggcacctggccgcgcggcgtggactctgcacgcctgggacagggaaaaagtacaccggagtaccgctcagtctttgcacagcagggaccgggctttttattctgggaaccttccgagggattggcgagggctcttctcagcatttgagggaagatcccatctcgtcacacactgctttgctcgagggtgcacagtggcccgcactcctgggtctcccagccctggaggatctggcctcaaccccgagaaaagattctttctctcccatttaccattattttgtaatttaaacgcgtccctgacgattactcatctcatacctagcagtacggcaacggacgtttgcttaagtgaaaaatgaaattgcgaccatcttccaacccaaaatggcaatctcatgggggcaaactataatctgtgctctctttagacgggagcggtcagtggagacttgggattggtgttacctgactgccagatcatcttcctttccttccaccttctgttcttttgacaaatacgcccagtgtctttatatgtccagtgctctccaacaaaagcaaggattctgctttggatcacattgcctcatcacaacctacagcatgtcatcttctcttgcagcattagagagagaaatcagccttcgactttgacaatattaaactacattacattgaaatttaacatagaacaaacaaaatgggatccaaggtggtgggtggctgaagggtgaattatgggaaggagcgatacagtctaagtaatacagcaaaagcagctaaaattatgagtggatttgaatctccccatttttagtaccacttgttgggaaaggcagcaactctttgtcaaaggttttcaccttatctggtacctccagcagctagatccaggatggggctacccacccctccacactcctaaagtgggtatacccctccagtgcttcaggacaactttgccagttttctctacccagtcctccgaaagcctcagagcctgctcagaccagagggcttagctgtatgtacagtactaaagtttagaatgttgcctctttacagagataccctcagattcattctgtaaagggagtcccagtgattaactgtgtctacttatatgaaatgataagaagaaaaatgttcaggaaaattactggaatttcttttttaaaatactaaccatatgataatgtgtttgtgtgtgtgtgtgtgtgtgtgtgtgtgtaagtcatacagacactacgtgaaaatctggcaattatccaattgaacagatcattggaaacaaaaaccacgatcagttaaggccctaagtgaactttttgccttaattttaagtaaatctgtttgcctaacaaaataatgtgaaagttatttgtgcttctattcaaaaataggaagtctaaataggcctatagcaagtaaataaatttaatcagtaataaaaaaacttccaacataaagaaaacacatgatgagatagcttcatgagtgatttataccaaacgtttaaagaagaataaatgccagttcttctcaaacgtatggtatgtggtgaaagcagaggaggggaaaagctgtcaatattctaaatttgctatttgtaattattataactaatctgagctcatgagactagtgttttagaaaagcagctctaggcaggaaaataggtaaaaatggagaatgatcttttaaaatagtgatttgtaagatgtttattttttatatactctttaagaaatttttgtaagctatcaactgtctcccagggggaaaaatgcccatgaatacgctaatgtaaaaatttctgcttacagtttaacagactgtaagtaaaaaaacctgaaaaagtttattctgttttaaggaaaaaaataaaaacacatgatgtctgaaagaagattctttgaagttcccaaattacagggtcttcatgactggaggcacaagagtaaaggggaaaggaaaaggaatttggagtcaggtacatttgcactcattctctttgtgcttctgggcatttaacctttctgtgcctgtttccttctctcaaaattggaaaaaaatagtacatatctatagtagattttgtgggtgttctgctcagatccccttggatttcttccacattttctgagcacccctcaccctgtttttgcctcctttggtttccaataccagccccaagaccaccacctgagagctcctgggacttttctttggaggaactgcccttagctaccagaccaccattgcccataggcagatagagcctaggtgcccctgagtagcacttagccaatgactgatggttgagaaccttgatctcatgttggataaatctgaggtacaacttacaaccagagctcctctatgggatcggactgaaaccatctcccactagaccattcctaaaatcccatctgtgttggcttcttgccctcctctgtcctgctacccctactccctttcctgtttctcctggcaacactttctttaaattgcttttgtagaaaaatacttgactcaagtcctgctgacataagacatcacattatagagttgatataagcatcaaatgaaacattataaagaagaaactagtccagtgcctgaaacagagtaagccttcaataaaacatatctaatctttttattctgaaactttagatctcttttagttcacataagcaaggaaaaaaaatttctctctttcactgcagaagaattttgaggaacatctccttgcctagattatttctgggcatagtattatctggagtgatcatatactatgaaattttcttctgtgaaagttcatgtctctcctaatttgtttttctgttcaccaaaattattttataaatacggcaagtactttgctttctgttaatgaatttcattttgtttctttcaaataaaagtaaagtgaggttatgaacctaacagcagagccccaaaatacacgaagcaataaataccattttttgataaaggtactaacaccattcagtggaaaaagatatatagccttttcaattatataaccacatctaaaagaatgagtttggaaccctacttcacactatatacaaaaataaaaatggttcaaagacctaaatataagagctaaaactgtacaactcttggactaaaaccttgccttaagtctttatcacctgggattaggcaaaggtttattgaatgtgatacaaaaagtacaagcaataaaagaaaaaaggtagataaactgaactccaccaaaatgcgtgcatcaaaaaacactatcaagaaaatgaaaagacaacacacaatggacaaatattttaaaatcgtccatcagaatatataaagaactcttacaactcaacaatcaaaagacaatagcccaatttaaaaacatgtaaaagatttaaatagacatttctccagataagatatataaatggctaataagcacataaaatgctcaatatcattttcattaggaaaatgcaaatcaaaaccacaataaggtatcacttcacacccactataattttttaaaaatgataatgaggttgtggagaaattgggaccttcatacattgctggtaggaatgtaaaatgataccaccactgtggaaaatagtttcacagttcctcaaaaagttaaacatatgatccagtaattctgttcctaggtagatactcaagagaattgaaacataaattcatacacaaagcttgtgtaaaaatgtttatagcaacattatgcataaaagttaaaaagtcaacacaaccaaaatgttcatcagctgttctatacataaacgcaatgtggtatatccatacaagggaatattatgcagtcattaaaaaacagtgaagctgaggctgacggattgcttgagctcaggagtttgggaccagcccgggcaacatgtcaaaaccccatctctactgaaaaatacaaaaattagctgggcatggtggtgcatgtctgtaatcccagctactcaggtggctgagctgagatcgcagccactgcactctagcctgggcaacagagcaagattttgtttcaaaaaaataaaacgaaacaaaacagtgaagcaatgatacatgcttcaatatgtatgaaccttaaaaacatcatgtcaagtgaaataagccagatataaaaggctacatattgtgtgatccatttacatgtaatgtccaggataagcacatccatagagacagaaagtagattaatgggtttgccaggggttagaagtaggggaaatgagatgtgactccctaatgtgtatggggtttcttttttggatgacaaaaatgttttggatagtgatgatggttgtacaatattatgactgtactagaagccactgagctgtacacttcaagacggttataatgatgacttctgtgtgaattttgcctcaataaagtaaattttttttaaataagaaaggccagattttttttgcaatggagtcttgctctgctgcccaagctggagtgcagtggtgagatctcggctcactgcaacctctgcttcccgggttcaagcaattatcctgcttcagcctcctgagtagctgagactacaggcacacactactgcacccagctaattttgtatttttagtagagatggggtttcaccatgttggccaggctggtcttgacctcctgacctcaagttatccacccccactcggcctcccaaagtgctgggattacaggtgtgggccactgcacccaaccagattatttttaaaaattaagaatctgcttaccaggtaagaattactacttagtccaaaactttgctgtggaagaaatttataaaatttcgacaaattttccaggcttgttcttaaaatatgaactatcagttttcctgttatcatataaacatcaacagattaggtctgcattccttcttcaagtctaatttcctcctccttcaatcttggttgtgccatatgtttttccttattgcatgtaggataatagagaagtaacgggggaaatggaaaatgaagaggagagatgaagaaaaggaaggatcaataaatggctgagaggattgagggagtcaattaaaaaagagagaaaggtaaataaaatatattcagttggttatgatttaggagaccgagttgatgggtccagtttctgtgtgggcagaaccattcttttttccataactgcataccaatgtaaaagacaaattaatttggggaaaatccaggaaaggaatcccagttggtcagggatcggagtcagaaaggtagtatgtggttggaaatggggagagtgacaggtactaatgttattgaaaggaagaatcagtatagcctggcgacaaatggggaggtcttgcatggaaagaaaaagttatttcctagattgcaatctttaggaagtatcaagaaaaataaaaagtactttctatgtaattaatttctcagttggttgttttgactttataccagaactcactatcagcactgacaatcacaattgtcagacaatttcctgaacaactatctcttctatctccatcattctaaagatagacatgtcttttaagcccaagacaggaacttcagcttgaattggggcccagagctggcaatttaaccctgaaccagaagtgtctttaatgagaatgtgtgctgttgaaacccgtttaggtttgtaaacatttccttcgattttccttagggctgtgatgagatattcttcttcccttgtacctcttcatacaataaaccttaatgagtgacggattcaaataggctcatttcttatttgatatgtgattttgaaaagtaaaagtgttaggatagagagtgtaaaggagcttattacattactctctttttttaaatatatatatattttttattatactttaagttctggggtacatgtgcacaacatgcaggtaacagagaatacttggacacaggaagggaacgttacattactctctttttaaaaaagttatttcaaaataaaaattttgaagctgagttttttttaattgttagtaaaagttaacttatgattgtttgtaaatagaagatatttatataattctagggatgcaaatataatcataaaatatgttaaagcttgggaaatgtatgtttat

SEQ ID NO: 928 - DNA, 1843 bp, Homo Sapiens
ccagggtacagggcaggagcctggacctctttacagttgccttttctctctctctgtcccttctccatcttccgagctcctactcgcccttcaggacccagctcgaatgccccatctctgggaggcgccttcaatcttgggctgccccttccgtcacaccccctgtcccctgtctcctgcctccccttcctcctcacacaaagccacccccgcctgttggtggcctgtgtctccgctggcccagggctctcttgccgtggccaccgtgggttttggcctcgtgacccagtccatgcgtgcacagcgcaagtagcttcccaggacaccgatttcctccccggccgcagctgcttctggtcctctgcccactcccgggttctgcgccttcctgcgcccccggcctggccacagctcggtcaccccagaaccaccgtgtgctggggatttgtcacgggtttgtcctgacgtgtgaggtccagccggggtccccatagcctccctgtccccgtccctgtccccgtcaggcctcctgctgcgctgtggacagtggcttggcgccatctgctgggctggtgcctgtggtgccgccaagcgcaggagggacccagcggctccaggtctgtgggagactttaagttggggccgaatgtggtgctcgctgccgacgcagagcccccaagctggacgggacccctggccgtgcggctgggaacacctggggttgtcctacctttgcagggacagcgagccaacccctgcttggaaggagcactttccccaccgaggccggcccagggcgcgtgctgagcaggtgggttgagtgggtggaaagaatgcaacccctggttgtgggacatgttgaagcccaccccaacccctccagtaccgtccttctgtccctccacttgctggggctgggggccaaggatggggtcactgtggggactttatccagctggttgacttcagggtcctggcagggagtggctcttgctgccaggacagtagaggcctagagagtcctatctctgacaccagccaccttgcagggttcgggccagggaaggggaagggatgggagagaatggaaacctccagagtcattttaactggtcgttggacagagccagtgcgacttcaagttcaatgacaaaccccctctccatgtctctggggtggggtggggcctgtggccccacagagctgagccacccaggaggccagggaaggagacgcagtacacaggaggccagggaaggagacgcagtacacaggagcccagcatcctctcagctgcatggacatctctacccagacccttctgcagccacctccccacttacccagcaggagaccaagccaatccttttctgcgaaactgtgctggcttctgtgactgtcctgcaaccagatagaggcctgagggactctgcacagtttctgggctgaggcagaagaagccccatggcttcccctctgcctcctgcatgctgccttttagctcttagcacctgctgggagaagctggccccagcgtggacaagcctccaggagaccggagcacccaccggaaggaagggagggagggagggaggaagggccatggaggtaaaacgaagttattagggtgggcccaaatctgactggtgtccgtagacaaaggggagattaggacacagacatgcacagagggatgacaccgtgaggacacagggagaagacggcatctgcaagcccagaagagaggcctcaggaggacccaaccctgcccacaccttgatcttggacttccagtctccatgactgtgagatggtaaataaatgcatgctgttaaggccacgg

SEQ ID NO: 929 - DNA, 2919 bp, Homo Sapiens
actggcccgtgacgcaggcgcggttggaaagaagctgaggactggatgtgcggaaaccaggtcagaggggcaggcaacagagtgggcgggaaggcggccgggagcgctatacgggtctagggaatcagtaggaagccggaggcgcggctggcggcgacagcgtggccggcagagcagggtcagcccaggtcgcccggggagtgcgcagggacgcgggcaaaaagcccgggacgcgcgccgccggggcctgcggggcctgcccgaggccgaggccccggttgggggtgcgggccggagctcccgctctgcgccgggggcaggcgtctgctggcaataccttcccaggagagctctcctcccggctcccgcttcaggaacttgtaccagaacgtgtccacgcggcccggctccgccccgtcctgcgccgcctcctcggccgccagctccacctccccgagccacaggcccggctcctgcagggccagggccccgtcgcccgccgcggtgccggccggcctcaggcggacggcaccgcgcggctcccaacgccccagctcgggccgcgaccccaccaccagcagctccggccgggcgccggccacggcgggtggcaccaccaccccaaagcggaagcgcatggcgggcggcggcggcgcgaatacccgggcccggagtccccgcggccggcaggcgcggcccgagcactaggcggccgcagcgattgggcggtggtgtgggagccccgggcaccggggagaacacgtgctgttctgcgccttctttgggatgcatcacgcggctcccgagcccagacttcgtccaggccggcgggaaggggtcagcggagccgctagctgcctctttgtgccccgcaaccccgcgggcggttgatttccacctgtgggcgctggggacacgcgaccggaagaaatggaagagaaaacggggttcggggagggaggaaaacttctaagccaggcgatcgtccagttctctctccaagagactggaaattaactttatgaggatcataaggaagggaatgacctctagacagccgccttctaattgtgaaacgggggaagatcttggacctggtctctggagcgctccctatcttaaccaagtcacttactctagcaggtctcaggttctttgtctgtaaaatgagggtgtaaaataatgatctttctagaccctacgagctctgaaggatctctgattggtggagatcacccaagacccggagctgatgcaaaacattacctaccattcccttgtctgaaaagccacatcaactttcttttttcaaaaactatatttttagtatgtgtaaagtaagtttggagtaaatactttcaagtccttttcaaggtcaaaacaaaaactaattctgtgactacaaatgtatgcttttttttttttttttgagacagagtctcgctctgtccaaatgtatgcatttttaatggagtaaattaaaaaaaaaaacctttgtttaaaatttactttcagcaaaagtcagcattattttttcaacttaaaacctttttgggttttaagttgaaacaggttttttagctgtctggcccaaatccaaaatacgtatatcttggtggggaacttcaatttgtctctgccataagacaaacgaatgtcctgatactttttgattctttaacaaaattatccttgtattcttaggtttatatattcactaacatttaacataacacaaatctgttacgtgaattaaagacacacaaaggcatttttaccagtgtttggaagtttgtgaatagtaaaggggaacaggccaaaatttcatgcgttgaggatataagtaaaacagaaagtgcaaaaatgtaaactacacaaactcaatctcttgtggaacaattagaaaactaataatacattttactcttgaatgttgatattccactcgaagtttggttggttgctaagcttaaggataaacactatgaaaaatgtgaagacagaagggctggccaaacacagctgattcggcagcaaatcacacattaaatcacagtggcatgtgagtcggtttattcaaattgctgttaaaagatattcttagagtaagtttaggaaaataagagtcatttggcgatgcagagaggattttgtctacagtggaatccagactccggtgaaagttctcattccttcaggacctgggagctaacagctccggactttcttgtgctccactgtgctgcctatgttgtgtgcttcccaaatggcattattcccaccagctcttccagagtgagttctgcccattctgtagaagaaacagtagcggaaaaattaaacaatatctttgctcaacggacattgtttcctttactcttctttcatcataaagaggttgaaataattttaaccattggaagaagtaaccctcttaagcccctaaacaaaatttgtaatagcttattttatggcaaggatttaaataaggtataaattggatagctgcactgtgtagtaagtaaaatgcaactggaaaggagaacaagaccaaaatagggcttaagggacatatatcaaggccttgatcatattttgacggtcagtcatttggatgtataagtattaaccatgataatatccattgagcctatattatgggccaggcacatggttttcgtactcatattatcttatttaagtctctcaccaatcctataaggtaactacaattgttacccccatttttagatgtgaggatacttcagcacaaaagggtccaatgaacagcccacagcaaggaaggggcagagccaggggctaaaaggggtgcattcagcttatagatatagatacagatataaattctgataaggaaaatctgtttcagaatgcatataaattctagcatatttaaat

SEQ ID NO: 930 - DNA, 22303 bp, Homo Sapiens
agggcggaagccacgggacgtggagcagatggtgaggatagtggggaggtagcagcagaggatgacccgaggcaaaagtgcaagtgaagaaaagtcgccttgccgggcagaggtacgggaccaaggcgcctcctctgggctgaggagttagagggaagaaaatggcgccctgtcatgagggcgcgaggtccgagttgaggggagaagactgagggacacagaagtggccgaagtgagggcgctgaggtcagcctgagctgagagggccggcagatcacgccgcagccgaagtgaacgaactcgagtgagatggaatgttgctctgtcacccaggctggagtgcaatggcatgatctcgactcactgcaacctctgcctcctgggttcaagcaattcttcggcctcagcctcccgagtagctgggactacaggcacctgccaccacgcctggctaattttttgtatttttagtagagacggggtttcactgtgttagccaggatggtctcgatctcctaacctcgtgatccacctgccttggcctcccaaagtgctgggattactggcgtgagccaccacgcctggccgttccgtatttcctttatgttttattttgctgttatttgcctagcatattcaaggtaccaaattaagtattgattgatggtaatagtgataacattaagacttggagatcaggttaaagacagatatgcaccatgaatccgtaattgaataagacagaaggaaatttaattagcctttttcctgtgtccatagcagtgctttaataagaacaatagaaaagtcttttttttttcctttaaattgctaatccaggatgttttcgatgcttttatggaagtcagctaactaaataccttgagagaacagcaataccatcaaattacatctgtctgtgacattttctctaggatgggactaacaaatttgatctgtttttttttaatatgtattaattcacacttattgcattacaacaaggtttttgtcttcttagctcttctctttttcaggaaattactccaggatttgaatcatcacaagagattcaccagaggattttatacacttgggctgtggcagcagactaattacatcacagcactaggtaagataccgggagtccggatcctcaggacttatgaaaataaaaagcattactgtaatattagtgctatttattggagttatctatgaaaagaatcttattaatctgcttttttattagctcacttagcaaatatttattgcataccaactatgtgccaggcattgttccaggtgtttgggccacatcagggaccaaaaaagaccaaaattcctgtcctcgtggatctcacattctagtattcctttccatatgcattagcttgctagggtttccataacaaaatatgacagactgggtagcttaaacaacaggaattaaattttttttttttttttttttacacttctagaggctagaagtgcaagaacaagatgttagcagggttggtttctcctaaggaccatgaaggaaggatctgttccaggcctctgtctttgacttgtagataaatgtcttcttcctgtgtcttcacattgttttttgtttgtgtgtccgtgtccaaatttcttcttcttagaaggataccagtcatattcaattagagtccatcctaatgacttcattttaacttaattacctctttaaagatcctttatcccaagatagtcacatgctgagatatatggtgttaggacttcaacatgtgaattttgggggaacacagcccataatatcacatatgattactgtgtatccacatctttgtgttgtctgtgttctcctatccacatccctgagatatccaaagccatttatgtttacttgcaaaatgtgtccagtgacctgtaattatgagtgattacttttctaggtatgacttattattttgaaagttttactttttaattgacatataatagaggtataaattttcagggcacatgtgattattaaatacatttgtataatttgtaaaggtcaaatcagtgtaattgggatatctatcaccttgtttgttttttatttatgttagaaacatttgaattattctcttttcgctattttgaaatatacaagacataatttaattttaagctatactaaaaagttcttggttaggaaggattattctacttggaatgatgctccatctagtgttcaccatattctactacttttgttaaagttttaaaaatgaataaaggggaaactgtgttgaagaaggggtcctctatttaacagttaggttcttactcacagagcactatggattcatagtaaaaaaaaaaatattgtttcaaataccatatgtgggaggaaagagcggtctatataagacattacttttaataattcaagaaatatcgttaccatcatttactgtcaccaccagttacgatgtacttttatcccatgaggagactgagactgagtttagtcatttacccaaaatttcacagatcttggtcaggtacaagtcagtgatggagatattgtttgccctacatacactgtgtaattcctgaatttgaactcctaattattcagaataaataaaaagagacaaaaagacacaaacttgtcctgatgcactttttagatatgaacacatgtaagcatatacctaattgggtactgaagtttcccttcaattttagtacattttaatccttgtcttatattgaaatgttatctttttgttcagtattttatcattgttgatgtgctgtgtcagaatgtgtctgtccatcttagatagtaaatttataaatgacaggacttaatccacaaccaaatcagcatattatagtttatttcattgtatatcttgaatgaaattgaaaaatttaaataactatttaaaagtttggactttcctctttgtagttttaaaacataatttttgtttttctcttgtacaagttgaatggggcagcttgactgcttggagacatcaggaaagacttccagggaaacaggagtttagtaggataaacatggcttacaataggatgcttcaggaatacagaaaggtccttgtaaattcataggcgtgtgtcagagcttgacacttttgggtaaatgtaagtagtaacagtgcaggcagtggtgttgaaaaatgacagtggattaaaaggcatagcctaaacttaaaagataactatgaagctgctcaaagagcttaacaatgggagtggaatgaacatattggacttatcaaaatattatataatggacaatctaaataggcttatatatattaaataattgaattaataatgataatttctagaacagaaagcaccaagtccagatgggctcattggcaaatcctaccaaatatttaagaaaaatattgtaccaatgctctataatctttcagaagacagaagcagaggaaacatttcctaactcattttatgaggccataattactctaatatctaataccaaaatcagacagagacattagaaaaaaagaaaactacagacaaatatggcttatgaacatagatgcaaaagtcctcaacaaaatattagcaaatccaatccaatgatgtataaagataattatgcattatgaccaagtgcagtttattctaataatgcaaatctggttcaccatttgaaaatcaattaatgtaatctgtcatatcaacaggctaaagaagaaaaatcacatgatcatatcaatagatgcagaaaaagcatctgacaaaaaccagctctcattcatgatcagaactctcagcaaactagtaatagaggggaacttactcaacttgataaagaacatatgcaaaaatctttcagctaacatcgtacttaatggtaagaaattgaagctttcccactaagatcaggagcaaggcaaggacgtctcctttgaccaacccttttcaacatcatatttattggaagtcctagctaatgcaataagacaagaaaaagaagtaaaaagtatacagattgggaagaagaaaatagaactgcctttgtttgcagatgacatgattatctatgtagaaaatctgaaagaattgaccaaaaaaaccctcctggagctaataagcaatgataacaaggtggcaaaaataggttgatatacaaaagttaattgctttcctatatgccagcaacaaacaaatgagatttgaaattaaaaccaaaatcccatttacaataatacccccaacttaaatacttaggcataaaactaacaaaaatatgtaagacctttataagggaagttataaaactctgatgaacatataaaaagctaaataaaggagagagattccatgtttatggataggaagactcaatattaccaagacatcacttcttcccaacttgatgtatagatccaaggcagaccaaaccaaaatcccagaaaataatttcctggatattaacagaatctttttttttttttttttttttcctgaaacggagtctcactgtgttgcccaggctggagtgcagtggggcgatctcggctcactgcaagctccgcctcccaggttcacaccattctcctgcctcagcttcccgagtagctgggactacaggcgcccgccaccacgcccggctaattttttgtatttatagtagagatggggtttcaccctgttcaccgggatggtctcaatctcctgacctcgtgatccccccgcctcggcctcccaaagtgctgggattgcaggcgtgagccactgtgcccggcctattaacagattcttaagtttataaggacaggcaaaagacctagtatagcaaacataatattgaagaagcacaaagttggaggactgtcactacctgacttcaagacttactataaagctacagtaataaggacagtatggtatttgcaaaataatagaaaaatagatcaatggaacagaatagagagcacaggtatagacccatacaaatactatcaactgattttttttataaaggagcaaagggaatacaatggagaaaagataagttttcaacaaatggtgctgaacaaggggatgttcacatgcaaaaagatgaatctagacacagatcttaaacttcacaaaaatcagctcaaaatggattatagactgaaatgtaaaatgctaaactatgaaactcctagaagataacagaagaaaatctagatgaccttgggtttgaggtgaatattttagatccaacaccaaaggcatgatccatgaaagaaataattgataagttgtacttcattaaattaaaaacgtttaatctgtgaaagcactgtcaagagaatgaaatgacaagccacagactgggagaaaacatttgcaaaatacatttgataaaggactggggtccaaagtactctaaaaactcaccaaagaagacatacagatagcaaataagcatatgaaattgtcgacattgtatgccattagcaaattgcaaattaaaacgagataccactacatacatattagaatggctcaaatgcaaaacattaacaacatcaaatgccaaatgctggtgcagcaagaactcttcattcattgctggtgggaatgcataatggtagagccgttacacagtgccaatcataatccgaaagacaaaatcccaaatgccataatctcaaatgcctatgaagtgttcggttgtgtttttatgtttctcaaacaaacctcctttacaaatgtaagtaaatgtctttaaaaaattgttttttaattatctttccagaattatattgtgattttggtctatcaggatcaggatttttgggattttagactttagggattttgatcttttgggatttcaacatttgatattacagcatttgcaattgtatctttcaggagtatggcccaaaccccagccatgtagaaaacaatttgataatttcttaaaaaactaaacacccagccactgttgaaaatagtttgtcaatttcttaaaaaaactaaacacacttttgccatacaatccagtaatcatgagccttggtatttactcagatgagttgaaaagttatgtccacataaaacctgcatgcagatgtttatagcagctttattcataattgtcaaaaattggaggcaaccaaattgtctcttagtaggtgaatggatgaataaactgtagtacatccagacaatggaatatttttcagtgctaaaaagaaataagctatcagctgggtgcagtggctcacgcctataatcccagcagtttgagaggccgaggtggatggatcacttgtgcccaagagttcgagaccaccctggccaacatggcaaaaacccatctctacaaaaaatacaaaaattagccaaacgtggtggcatgtgcctgtagtcccagctacttggggggactgagagaggaggattgcttgagcccggaaaggagaggctgtagtgagccatgtttgtgccactgcattccagcctgggcacagagtgagaccctgtctcaaaaaaaaaaaaaaaaaaaaggaaaagaaaaagaagccatcaagctgtgaaaagacatagagaaatcttaaatgcacattgctaagtgaaatgagccaatctgaaaaagctatatactatatgacttcaaccatatgacattctggaaaagacaaaactatggagacagtagaaaggtcaatggttgtgagagattggagggagggaggaaaaactgtgaagaatgtagggaatttttagggcagtgaaactattctatatggtactataatggtgaatgaatgtacttatgtgtttgtcaaaacccatagaatgtacaacaccaaaagtgaactctaatgtaaaccatggactttggatgataataaaatgtcaatataggctagttgattgtaacaaaggcaagaggtgttaattgtggggaggctgtgtgtgtgtgtgtgtgtgtatgtatgtgtatgtatgtgtgtgtgggagcaaaagtcataaaagaaaattctctgcactttctgctctattttgctgtgaacttaaaactgctctaaaaaataaagttgatttttttaaaaagcatgctatcagtaagccacccagacttcaatctgtttcactcttgaatgaattcacatcaggcatcctttttacataactttaaattgatttttaagaatgagacttagaatataaacactgatgatcctgccagacaaaaaagcttcttgtaaacatatataccattaggaagcaaaagaaaggaggaagttaaacaaataaaagatacataacaaatagcttcatatttaatgaattgatcccagtatgtcatttgggactagctgaccataaaatatcctcctactacccttgaaatattttttcttgggtcttcagcataatagctgtggagctactgggtccagttactgtattattgggtgttttatgggtgctatttgtacactgtatctttattttaaaaacctattttggctgggtgcagtggctcacgcctgtaatcccagcactttgggaggccaatgtgggtggatcacttgaggtgaggagttggagaccagcctggccaacatggtgaaacctcatctctactaaatatacgaaaaattagccaggcatggtggcatgtgcctgtaatcccagctactcgaaaggctgaggcaggagaattgcttgaatccgggaggcagaggttgcaggtagctgagagcatgccactgcactccagcctgggtgacagaatgagactccaattcaaaaaaaaacaaaccaaaccaaaacaaaaaaaacctgttttgagaagtcagcaatggtcagttcaatattggccattaagtaatgcaagcattgtaatgtaaggtttgattattgtatttgtgttacctatcattttacagtactaaattcccataagccatgacaagttacctttacaagttacattcatgttttacctttctttatattgactattctctgtttatagagaagaggtgaatgagtgaaatattagctactataaaataatggctaccatgtccataaaataatagactgcctggtctactagatgccagtaatcatattaatagctttatataattatctcctttaatctttgcaaaaagtctgcattatagttctcagccctcttctaaattgagggaactaaggttcaaagagatcaactaatttggtcaaagtcacacaggaaggcagtacagagtaatagttaaatgcacagtctttgtggcctaattccctgtgttagtattcttgttccaccatttcctaaatctgtgaccttaggcaagttatctaactcctttaatgtcatttttctcatctgtaaaatgaaagactaagtgaaataattcatgtaaagtgctcagcacagtggctggtacagagtgagtacttcataaatgttagtggttattaaaagtaattgtatattacacagtcattgtatattctttttattattacaaataggtgacaacatggatttaaacttaagtctccctggccctgaagttcccttcttttcctttactcaactctctctgtgtaaatttttagtcattggtgaagagagaactgattctcctaaatggctttacctctgtgaaaaaacagatttgccagtttatcagtcaggttaggctaggtttgctgcattaatgaacaacttttatatatccttagtttatcacaaacaagtttatttctcatttccattttatgtcctatgtggcttgactgggagacttctttcattatagtcacccaggaatctaggctgagggatgctccatttgccgtatgttttatcatggccaaggcagaaaaaaagggaaatggtgacttctgcactggttcttaaatatttctttttagaagtgacaagtgccactgctgcttataatttcattggtcaaagccagtagcatgaccaggtctaacttcaagggctttaggaaagagaggagaattagacataagtgagcagcattaataactaccacagcggccaggcacggtggctcacgcctgtaatcccagcactttgggaggctgaggcgggcggatcacgaggtcaggagattgataccatcctggctaacacggcaaaacgccatctctactaaaaatacaaaaaaaattaggcaggcgtggtcgtgggcccctgaagtcccaaaaactcaggaggctgaggcaggagaatggcgtgaacccgggaggtggagcttgcagtgggcagagatggcgccactgcactccagtctgggcgacagagcgagactccgtctcaaaaataaaataaaataaaataactaccacagcaaattgaactttttgagtttcctaatttgatatttctctttttgatttctaaatttcttcttatgtgtatagattcacttggtaaaaacctaaagataacttcatagaaatagttctctttcagagaggtccatcggaattatctggatacagtttccaaaatgatgtgcccaggccccactcaagacttaatgaattgaaatatatgagagtcaggctctgggcgtgtacattttgaaaaactcctcggatggtgctggcttgcactctgttgtgtttatgcaatagtaaaccgatacgtgttttcaaggatcttgctgaagacagatgggaggaagcagagctgaaaggatcagaaagaggaagggacaaggtagaaattacgactcaagtgtggcagggttctgagctcagacttaagctgtacttaccttagaagttcacattgggagatatatctgggcatgcctagatgactggtgggtcagtcatcagagttccctttttataaggtaacatggatcctcctgggaaaaacttcatcttaaattgagagacttttttccccaatatttaattgaaaaatttttaatcatacggaaggttgaaagaatttacccatcatttagatttgataggtgctatcattttgctgtatttgctttatttgctaatttttatagccactgatgatcattacctgaatcaattatttcactgaggagtgggcattggcaaatggtgatttttccgatgtatcatttcttctacaattattatctacattcttctattaaaagagaacttccctttatcaattggagatgaagtaaattttcctaaaaagacatcataaatgcttcattattttaatttggaaagagttttcaggaacctatgtttggtttaaggacagttgacctacattgtagtgaacagatgagctgagtatagcagaggcttgtgcatatttttctacagcccaaccctcagaatgctagagcaaggtagctgcggtgaaaaatagtgtagaaattacagtggctatatcactgaggacagaaagacttggcagcgtgatcagagctcactgcaaactctgccttccgggttcaagcagttctttgcctcagcctcccgagtagctgggattacaggcgcctgccaccacgcctagctaatttttgcatttttagtagagacggagtttcaccatcgtggccaggctggtcttgaactcctgacctcatgatccacctgccttggcctcccaaagtgctgggattacaggtgtgagccactgcgcccagcccaacaaggtcctgtctaggtaaaggaaacgcataggcgaaagtgatggatagaatttgaaaagcagagaaaagatggcaagtggctcagattgaaagagaaattccaaatatactagttaactagttgagggaaccagagagtctctggatatttaatgacaagcttaaataagctaatctctgatggaagtcagcattgcatgaatggttgaagggccaaaaacatgatatatccctttatatgtttaagtgtttttttgtgcttctcaatgccatgtgatgttttttatggtaaatactgagatttaacaaaatataaattaaaagtttattcttgatacaattaatagctcctgaaaagttaaaatgatctagaaatcagaattcttttaatctatactgaatgtaggggttgtggttactaaaaattagtcaaaccatatttgggaattaaagaaataatgattgctggccaggtgtggtggctcacgcctgtaatcccaacactttgggaggccaaggcaggtggatcacttgaagctaggagtttgagaccagcctggccaacctggtgaaatatatatatataaatttgctgggtgtggtggtgcatgcctgcaatcccagctacttgggaggctgaggcatgagaatcacttgaatgtgggagacagaggttaccgtgagcctagatcgcaccactgcactccagcctgggtgacagagcgagactctgtctcaaaaaaaaaaaaaaagattgctttttccctttcacttacccttttttttggaaagataaaacaaagtgactttcttattatctcatgtttcttgtaaacagtgatttcttggtagagaaataaaaattgtttcttaattgggagaaaagaaattaacagctattgctgtggttggttctatttttattatttattggctaaatgtacatagactgaaaggaaaattaaaagacaaactattcactaaatcctggaaaacagtatatgttataatctgcatttcataaaattaagggataattttaaacatatttcctcaaacagtaatataattaagttatgcttagtattcaactaagtgattagaattcagttgtagtggtacttatctttttaaaaaatataaaagttaccatgtttttacagagtggaaatacagtaattaataaaagtgttccattgtgtaggctattttcttccccccgagtgaagctaatcagttagtttcatgctccatatgcagtcgttggatcatttttaaatgatcaatgatcattcttaaatgtgtcaatgaaaagcgccaaactttgtcaaatatttgaagagatttattctgaaacaaataagggtagccatggcctgaggcacagtctcaagaggtcctaagaacatgtgcccaaggtggttaagttacagctttattttataggttttatggagacatacaccatcaattattacatgtgagatatacattagtttgttccggaaaggtgggacaactcaagatggggaggggaaggagggaacttccaggtcataagattttctgattggcaattgattgaaagagttattatctaaagacctagaatcaatagaatggaatgtctaggttaaaataaggggttgtgaagaccaaggttttatcatgcagatgaagcctccaggtagcaggcttcagagctcttatcagacctgaaaaggtgctactctcttagttaattttctctcctggatcaggaaaaagacctggaaaaggaatgggaattctctatagaatgcagattttccccacaagagacagctttgcagggccacttcaaaatatgtcaaagaaatacattttggggtaaaatacttcaatttctttcagggtctgctatccattatgtgatgctatactagaatcaggctggaatttggtgtcctattgctacaaaaagtctgttttgtcagtcttaagatctccgttttagtgttaatgctggtcagctgtacctgaattccaaagcaaggagggtataatgaggcatgtctgacccccacttctcatcatggcctgaactggtttttcaggttaattctggaatgcccttggccgaggggagggtccatcagctgattggggagtttagaattttatttttggtttataatactaattatagtaaatgaatataaaaatttaaataaaatatttaaagctggaatttctaatttgttttgaaaatttaattaaatactggtaaacatcttataaaaataaaactaattatgactctagaattaacacccaaatgtcagtataaaactgggacccccaaactcactatgctaaagagaataacttgcttcatacttattacacctagacatatacacgcatagattcatgagtaagtaatatgagctgggcatggttggctcatacctctgatcccagcactttgaggggccaaggagggagaatcatttgaagccaggagttcaagatcagttctggtgttacaggaaaagggtcctgatccagaacccaagagagggttcttggatcttgcacaagagagaattcagggcaagtccacagagtaaagtgaaagcaagttttacgaaagtaaaggaataaaagaatggctacttccataggcagagcaagagcctgagctgctagttggccatttttatggttaattcctgattatgtgctaaacaaggggtggattattcatgagttatccaggaaaggggggcaattcctgaaactgagggttcttcccccatttatttatttatttatttttatttttatttttgagacagagtctcactctgtcaaccaggctggagtgcagtggcaccatctcagctctctgcaacctctgcctcccaggttcaagcaattctcctgcctcagcctcccgagtagctgggactataggtgtgtgcaatcatgcccggctaatttttgtatttttagtagagacggggtttcaccatattggctaggctagtcttgaactcctgacttcgtgatctgcccacctcagcctcccaaagtgctgggattacaggtgtgagccactgtgcccggccagtccccttttggaccatatagggtaacttcctgatgttgccatggcttttgtaaactgtcatggtgctggtgggagggtctcttagcatgctaatgcatttaattagtgtataatgagcattgaggatgatcagaggtcactcttgttgccatcttggttttggtgggtttggccagcttctgtaccacaacctactttattggcaaggtctttatgacctatatcttgtgccgacctcctgtctgaacctgtgactaagaatgccttaacctcctgggaatgcagcccagtacctctcagccttattttacccagcccctattaaagatggagtcactctggcttaaatgcctctgacactggcaacgtagtgcgatgcagacttaaaaaaaaaggtattagccaggcatggtggctcattcctatagttccagctagtcaggaggctgaggtgggaaaagctcttcagcccaggaatttgaatttgcagtgagatatgattattgccgctacattccagcctggatgacagagcaagaccttgtctctaaaaaaaattaaaaaaaacattttttaagtgtaatatgaattgtttaatattacagactgtttctcagctaccatgaataacagtgctgaatagtatagcaatcagtgattatcactggatattccaagtgaaacctgaagagaagccaaaaaaaaaaaaaaagggacatttgacactctgagacattggtaaagtatctatttcattcatgctctcagagaggaaggatttgtcaaactatttgtattttctcttactaaagtgtttctacttttgtccaaattttctctgttgtccaaagcacagtcttggacagcagaggcacaactcacacacctacatagaatgccagggtagtcaccttttttctttttctttttttttttttttttgagacgctctgttgcccaggctggagtgcagtggtgtgatcttggctcactgcaacctctgccttccgggttcaagtgattctcgcgcctcagcctcctgagtagctgggattacaggcgtgtgcccccacacctggctaatttttgtatttttagtagaggcggggtttcaccatgttggccaggctggtctcaaactcctgacctcaagagatccaactgccttggcctctcaaagtactgggattacagatgtgagccactgtgcccagccagtcaccttttattttgagcaagagctgtggagaaacatttacttggagcctaaatgaagttagtgtcacaaaagggaatgtttaaggttatagattgcactgtggcagctctgagtgctggatggtgagtgacatacaccagtgtgttttttcataagttgatagccctctcttgatgatacatagggccctgtaatgtatggggcctaggcgcccagttctaagattggcattgagtcttagcattaagtatgcacatgttcagatcatgctcctattttccagtagagtaattattcccacagctgtttcttttactttttctttttcctttttattgagacaggatctcattctatcacccgggctggagtgtggtggtgtcatcaaggctcaccgcaccctcaacctcctgggctcaggtgactcttctgcctcagcctcctgagtaactgggaccaccactgcatgctatacctggctaatttctttttaaattatttgtagagacagggtttcattatgttgctcaggctggtatcaaactcctgggctcaagcaagcctctcacctcggactcccaacgtgctaagattacaggtttgagccactgtgtccagccacacggctgtttctatcattctgtattccagagatcaccagttctagtcttctgcaggggtagttgctcaatgtcatgagtaagagaggggaactacagatctacctccttttaagttttgtattaattttttttttaattttgaaataattttagatttataaaagagctgcaaagatggtacagagagttcctgtgtactcttcatcaagcttcacctgttgttaacatctttcataatcatggtgcatttattgaaactaagaaattaacatgagtatgatgctatgaactaaaccatagactttattaggatctcaccagtttttctgctgatgtctttttttctgtttcaggatatcacattgtatttggtcatcatgactccttagtctccaatctgtgccagtttttttggtcttgtctttcatggccttggggatttttgaagaataatggccaggtattttgtaggatgccccttaacttagatttgtctgatattgggatttatcatgattagattgggaatatgggtttgggggaagaatactgcagaggtgaactgccctttccattgcatcatatgaggggtgcatgatatccacgtgactatgagtgctgatgttaaccttgatcacttggttaaggtggtgtctgaaaggtttcctagttactctttttccatactttattctttagaagcaagacactaagtacagcccaaaatcaaggagtggagaatttattttaaaactgcattctaccaatccttatttgatactcccccaccccacttccaaaagtccacttggttcctgagcctttagaagattctgtggtatacatcagcttagtttttggcttttcctactgtatcctaagtcatttttctgttttccagtctccacaattttgttgctattgtctcttttttctctctgtgagtttgtgagtttttttttttaatccctttactgtagcttagtggggcttcggagagattaaaactgtatttttatgttcaatctgccttctttatttggaagctctgggagaaatatttttttttttgagacggagtctcattctgtcacccaggctggtgtgcagtggcgtgatctcagctcactgcaaactccacctcccaggttcaagcaattctcctgtctcagcctcccgagtagctgggactacaggcacatgccaccatacccgggtaatttttgtatttttagtagagacggggcttcaccatattggttaggctggtcccgaactcttgacctcaggtgatccaacccacctcagcctcccaaagtgctggcattacaggcatgagccaccgcgcccggccagagaaacattttatcatcatcaaaattgatatttaatctgtgtttagatttgtcatttctgcttgtcataattctgccattgatataatacatgaaattactgaatactttttgggcaccattgttatgttttgtaaagcattgtgatcaatcagaaattcagttcccagctagagaagaaactcttctagtattggctggtgtgactggccctgattttcaaaggtaaattagggttactgctataaagcagggattacaatggggtgcttctgtatactccaatgcccagttactaaggttaccaaaaaacaaagtgggtttgggcacctcaggagtcaaagtttgagtcagtccaccaggcaaagaaccttaactggcataagctagccaaaggcaacctaaacttgaatgggtagaggaggggagttacaatatccactatggtttcttgaccagttacataaaggaggactgtagctctctgtgtatctgctctctctcctttctttttcaccttttgttttcctacaattttatagagtgttttgatatcagaaatgtttaccatttagtgactgagttgcacttttttattttttatgcgtttttataatttttattactttttcaataaagataatgtatctgttactacatctgtgtaatacatctgtatggcttataaataccattctatactgtactcagaacagcagatactgttctgtactctgctttcctcgctgcatgatatatattagtgcataggaagagtcctttttttcagctctgtagatgtaccaatatttatttaaccaatgccctatagaaaatgtcttgggtttgtttctcatttttggctttacaaacaatactgcagtgaataacttcatatgaacctcattgtataggtttgtaggtatatttgcgtaaacattctcagaagtagtagagttgtagagtatcagtttagtattataatatatctagagtgggattatctatcatctgttttaatatggacaatcaggaaaatagcaatcatttctagtacttacaacagggaaaatttaatgcaggaaagtggttaccaggtgttggaggaactgagcacctaatggagaaaggggagcaattcagatattagtaacaacagaaaaccattgcctgtagcctggaaagacaaaagaagacaagaatcactgaattctggagctggaggtcatttactggaggctagggcctctacggacctgtgtgatgagaactggagctgctgaggagatgcagtcactgccagagaagtgactgagttagaagaggaagggggagaaatgtgctggtttattccttccctcctcatcctccaatctttgagaaaccagctgatatgagtctgggaatcgcagtcaatggatcaaccccttgcgatacaaaacagagcagggaagggcaaggaatgcatttgaggacaaatggattcagaatccatattgttcaccccttctgctactcagcattcaagttcacccttctacccatgtttaataccatcatacttctgtctgtcatacaaacaagaggagagacaccaagtcccatcaatcattgtatccatctcaagtttgggatctactggtgatcctcattccttcccatcaggtctggatgtgtctttttgtggcctggtgacctacgaactaaattgtaaattaagcaaccactgacactttccatgcaaaactgtgggggaaggggaaggggaaggggacaaaatagaaatcgttggttaatagatacataacaaatacacgtgaatgctacaattcttgttgctataaaaagtcgcaaggatgaagttgatttttatcatttcctttttctaccacttattccatatttcctttgcttttagctaggactgcaaatggtttgggttctttacttgcaggatgattgtatcagtcaggataaagccagaacaacagaaaccacacttggtatttcaacagagataatttaacataaggaattggctacggagttttggggaaccaaaaaagcaaaaaaaaaaaaaaaaaaaaccaaaaaaacaggtcggggcagatattgaacatagatatagtaactataggaagaagctaccactcctatggctgaggacacaaaaggaagtttgcaccaaaggaaacttaaaggagaggcatctcagacttctgaggaggggccactgcctaactcttgctggctcattgatgagacatgttgaggctggttctaggaatgccaaaaaaaagttgagtgttagaaatgatagccacttgtcaggaaggaagcatatcctgtctcactccttctgccttgaagaactaacaggaagccaactggcaaagtagaaatatagctctcatagtcccagccccgtggtcataaagaagagtataaatgtgtgagtttggactgagagaaaatggcataacaactgggacagctcattactttgcttactcaatattcatgcacaactttctctgtatatttgagcttctcatatagcaatttaaaaatggcagctttttctttaacaagatacagctaccctttgtagaaattgacactcttggccgggcacagagactcacgcctgtaatcccagaactttgggaggccgaggcaggtggatcgcttgagcccagaagttcaagaccagtctgggcaacatgatgaaaccccatctctactaaaaataaaaaaaatagctgagcatggtggcacatgcctgtaatcccagctactcaggaggctgtggcacgagaatagcttgaacctggggggtggaggttgcagtgagtggagattgtgccattgcactccagcctgggtgacagaacaagactcggtctcaaaaaagtaaataaacataaaaaaataaattgacactctcaccctttccccataaacggatgatcccaaattatattaatctctggattatgtgttaattactcctcaattcagtaaagtcccttatgaaccttctgtaacctaaagatgaaattgtaaagttaacaattgccattaatttttaaaattacagtgggaaaggagaagaaaaaaagttaatatatacagaaatacataaatacacacatatacattaagcaagtaagaaataatgcttagttattagtctttgtatctgtctagtcatgagcctgtggttagtgtcccttcctccccagctcatttcatgcttcctgtactctgagccagtatataccaagtggtgtgatccaaactgtcattcctgaagggtctgaattgtcagtggtcctgtcttttcttggttatcgtagtttaccattaacttttactgtcagcgatgggaatataggggtgccatgttgccatgaatgacagcatccccatatatagtccttcgtggcctcattttgtagcagcaacccaatgtttctttagttgtcaggatcaatcactccagccagtaattcccttctttgcccattggttcagttgcatgtggagtctaaaatggccatttagctgttagaaattcaatggaaactgtcttgggaataaagcagagttcaaattacgggaagcagaattctgtgaagaagtataacagtgagagaagccactttcccttttgctctttgattacggacttgtgtcttgtggctttgggagaaatagtgccatacattggtcaatggctcaaagcatatgttgttctttgaagacagtcccagccttacaaaatgtttctcagctcatgttgtaactgagtctgtagtaggccattccattgttatatcgggccagatatttctagatggtggggtgtgcagtaaggctagttatttccatgatttgcaaactctaattacacttctaagatgtgttccttagaagctgtgttgagtaggataccatgatattgagtaaggaattatgtggtagtgttggcagaaacacaatgggcagaagaggcaaatctatacacagaatagttgtctattctagcacaaacaaatggctttcatttccatgatggaaggggtgctttataatcaacctaccaacacagagttggctgatccccttgggaaatggtgccatattggagactcacagtttagattctgttcttgataatttgggaactcaacagtgccaacagtcagattagcttggtaaggggaagtccattttgttgggtctgtgcttcatttctgccactatggccattttgtacacaagcccattaaaacagaagatgaggaaaggtgctgactgataatcccagaacaagtcactttgttcacccctattattgaggcctcctctacaatggatgtaccttggtaagcactcacacaaattccttcacatttagtgcccattctgaaagatctgtgcatgtgtctcttcttcagtcttccttgttatcaatcttccaggcttgttcttttcaatttcctgaccaggtgaccaaagcattattcactgtccacagatgagtgtacatctgtaccacaggccacccctctttcctggctgaggggacttcaaggtatactgccaaaacttctgccctcttggagggttttccttcaccattccccttcagtggcatctctgagggagtatactggtactagtgtaatgtggacacacttctgtgaaccaggcccaagttggtttaaaaaattttttaaattttttatttaaaagattttaaattgacacataataattgtacgtatttatgaggtacatagttatgttgtgatacatacaatgtatagtgatcagatcagggtaattagcatatccatcacctcaaacatttatcatttctttgtgttgggaacattcaatattctttttctagctatttgaaactataagatattgttaattatagtcatcctatggtggcatagaacactataacttatttctcctatctatttgtttcctttaacaaagctctatctccctcttccccctactcttctcagcctttagtatcctttgttctactttttacttctatgagatcaactttttttagcttccacatgtgagtgagaacatgcagtgtttgacattctgttcctggcttattttgcttaacgtaatgtcctccatttccatccatgttgccccgaattacaggattttattctttattatggctgaatagtactccattgtgtgtgtgtgcatatatatatata

SEQ ID NO: 931 - DNA, 2894 bp, Homo Sapiens
ctgagatggttttttttgagacggagtctcgctcggtcgcacagcggcttgatctctgctcactgtaacctccgcctcctgggttcaagcaattctcctgcctcagcctcccaagtagctgggattaccagcacccaccaccacacctggctaatttttatattttcagtagagacggggtttcaccatgttggcaaggatggtctcgaactcctgacctcaaatggtccactcacctcagcctcccaatgtgctgggattacagacacgagccactgcacccagccaaggatatcactttttcttagatctaaggagatcaaataatttatgtttattttaagtttatttctggctacttcaatttttggttgctctgagttccttggacatacatccatatgtgtctgtctctcatactagagacttttctcaaatgtttgaggaccattaaccgtctattcatttgtaagaccaaggcattaaaaatctgagtgtcagccaggcacactgcctcacgcctgtaatgccagcactttgggaggctgaggttggagggattgcttgaacccaggagtctgagaccagcctgggcaacatggcaaaaccctgactctaccgaaacaaacaaacaaaccaccaccaaaaaaaattagctggatgtagtggcacacacctgtagtcctagctactagggaggctgaggtgggaggatcacttgagcccagaggtcaaggctgcagtgagctgtgtttgtgctactgcactccagcctaaaagaatgagatactatctcaaaaacaaaacaaaataaaacaaaaaaaatctgaatgccaattccagtgctggataaaatggaatatgcccactacaagctgctcttcctgacaggttacaattaaaaattggacaacacaaaaagcaattgaggattctgaaaaggaaaaatagctggttgatagaggagagtaaaaactggaagatcaagtagtacactggagtttcttgggttcttttcccctcttctttgcagaattgcccaaggggtaaggtgtgtgaggggtcagacagcaaaacaacaacaacaacaacaacaaaacaaaacccataaaacttctttctggccagaggatgaggacaagagatccatgtgggctggagagcatgatgacagcgtactttcacattcattattttttccctcttggccttgcctaaaggttggccagcagtccaggcacctcaaagcctgtctctttccctggaagaaatgagagaaggggtctctgtggctgtaagcatgtaaaaggaatcctgttgtttcttctcttttctttcactgcctcactcttcgggtgaagccagtcacatggaactgtgtgacagagaaggaggttaaaactgtctgagagaaacccatctttctagcaagagaaacagcgaaaggggtgcctgggagccagagatggggaagaaaatcccagcaaggaaaggaccagagaagggaatcccttaattctgtgtaggaactaacacaagccccagactcacccaagtggcacatgcatggaatagaccccaaaggcacagcaaagtctctcagaaataaactatgatataaaccatcattcaaattgcagacaaatcactgagaggcgcacatgagggcaaactcaaacaggatagcaaacgcttttaaaataaaactggcattgaacccatcacccacagaaggagaggcagagcttgtgaaactggattgcctgttaaaacaaagcaaaatcattattctccagatgttaacaggacccagactcttaaacatactcttcaaaatacactgacgatgcactccaagattatatgacatacaaagaactagaagaatgttaccagttctcaagagaaacaaacgatgatgaacagatgtcaaccctgagatgacacagatgctggaattaccagaatcagatttaaaacagttattacatctatgttccataagtgaaagtaaagagaaatgactgggaagatggaagttctcagcagagaaaaagtaaccattaaaaaaaaaaatggaaactatagaactaaaaaatataagatctgaaattaaaaatccactagatgaggtcaatagcagaatggagataccaaagggaagattcagtgagctgaaagattaacagaaattatccaatttgaacaacagagaggaaaaacatgttaaaaaaaaaagaatagagacttaaagaacaatcttaaatatcaatctgaaatataggacagtatcaaaaggtctaacatttatttcactggacttctggaaggagaaagaaagagattgatgcacaaaaaggtatgaaaaaatagtagctaataacttcccaaatttagccaaatataaaaatttatagattcaaaaactcagttaacatgagagttgattaaactcgaagaatgccacacccagacacatcataaccaaactactaaaaaccaaagacagaaaagcccttgaaagcatccagagaaaaatgacacattatataagtagacaagaattcaaatgcctaccaattttgcatcagaaaccatgaagggggccaggtgcagtggctcatgcctgtaatcccagcactttgggaggctgaggcggatggatcacgaggtcaggagatcgaagatcatcctggccaacatggtgaaaacccgtctctactaaaaatacaaaaattagatgagcgtggttatagaggctgggggagtgggaggaatgaagagatggtggtcaaaggatacaaaaatctcagacaggaggaataagttttattttgagatctattgcacagcatagtgaacatagtaaataatagtgtgttctgcatttcaaa

SEQ ID NO: 932 - DNA, 1856 bp, Homo Sapiens
gtttgttgcctcctcttaactgtgagactctaggggacagtgatggagttgctcatccatgtgcccccctctgcctaggagagagtgcccaacatagaacagaccttcaaagaatatcagcttaatgcgtaattcatctattccagttttcatctgggtagattgagatgtccaagattacaaagtttggctatctcctgagggaactcttacacatttcagtagcagagccacccagaggtgtctaactttaagtgcttctctccccattatggtttacagcagcaactttcaaattttttaatctaagaattcttttacacctaaacaccagtcatctccaggacttgacttcatcatttgcctgttcaccattgtatccctagaatctgtaacaacaaccagaaggtactcaataaatatttaatcaatgaacaaatgactaactcatttctactgtaagggtatatgtacttgagagaagttaagtatatgtacttgagagaagaggaatttttattatgtgaaataaggcatatgttaattatcttgattaagccattacacaatgtatacatatttcaaaacatgttgtatatgataaatatatacaattttatgtcaacttaaaaaagaataaagaaataataataacatcaaaaggagcttttatgtatttatttgtatatattcctggggtacaagtgcaattttgctacgtggatatattgcattgtggtgacgtcggggccttcagtgcatcactggaacaacacacactgtacccaccaagtaaccccccatcctccaccctgcctcccaccccctcagcccccaccctctgagtctccactgtccatcattccacatgctacatccatgtgtacacatttttttagctcccacttattagtgaaaacgtgtggtatttgtctttctgtgtctgagttgtttcacttaagctaatggcctccaggttcattcaggttgctgcaaaagacatgatttcattcttttttttaaggctgaataatattccattgtgtatatataccatattttctttatctaatcctctgttgatggacacttaggttgatttcatatctttattattgtgaatagtgctgcaataaatataccagtagagaatgtgtgctttgaagagattgaaaaaggtttgaaataagcacagtagagaatggaatacagagttgactaataaaacatagtggggattgacaggaaatactaggaatccaggtgaagttggtgacaatgaatttacagtaatgtaagtctactcagtagcatgattttccccagcaccactaagcagcctgggtgcaggtgaagacaagatgagcagttgcgcacatctaggtttgagaatttgtcagatagatgtgaataaaagacaacaaagcaagggagtgtagaatactgaccaaaaaatgactcatggaaaaatagaatctaaactgtgctccagcttagagagggaagagagaacatgtgtgcagggatagaactgggaaacagcaggaagatcagtggactagaacagataggagataatagtcaggaatggctcaattcatgatttcttaggtgtagttattttggatatcacagttcatctcagacttccaagagagtttacattcttagtatcccccaaagacctccttcacttagaaggtgaatataatagcaaaaactaaaatttactgagaatttcatatgttcttagcactatgccaagcattttacatgcattgtccccatttaaccctaccagtatcaatagttacttcaaacgttacagcagttgggcccatctatgcaggttgact

SEQ ID NO: 933 - DNA, 6440 bp, Homo Sapiens
atttttagattatgatggatcccatagtgctcactgcctaccaggcattcaagtagaacatgtgtatgtggctcattcattcatcaagaacctgtgcactgctttaaatgctgaagagtcagcagtgagcaaatcaggcaggaattccggtcttcatggagcttacattcgtcaggaggtcggggcaaggttggtaggggagacagaaataaataaatagttatacggggcatcagatgatggttatggctgtggagacaagtgaaacggaaggcgcatgggaagtgggaggaggaggtggtaacgattttaaatggagtagtcaggatggactcaccgagaggatcacatttgagaggggtcaaaccgtggaggattcccagtgggggaacagctggagcaaaggtcctgaggcaagagagtgcctggcacgttcccaaaacagcacggaggccaatagggctggagcagtgaacgaggagcttccccaggaacacagacatgccactgagctcaacccattgtatgcgcccatcccaaaacttcagtttggaacaggaagcaggaacctgcagcatccatattttggcgaagggctgatggacagcagtgttggaacttctggagtctactttccactgtccaccatacaagctgagggatctgtccctactggctgtggtttggccattgtctgggctatgtatcctgcaatcctgactcgagcattcctgaagtttctgtaatctgtctgataccacactagccagtgaagattctgtgatctactgctaagagggctgtgtgatgttgaaaatcatttcaggagtataccagcaacaggtgctcaagggtgagcttgagaagtcgagagaatttctaatggcctgcttgcttcttcactgacttctgggttaaaggtggcctatgatgcaagaagttgagatgctggaaatgctcttacattacataaaaggatccaaaaacaggcagcccagaatgttggagtggatttattaggtatgtcatccatccccacctgtgtttgctgagagggcttagaggacacttttgcccatcactgaggaacttgttggtgagaaatgctggcaactttggcctgtcaagggtgtgggtgggagcctttgcctatgaagtggccttcctgctttcagggaggataatgggatcttagggttgacaatggccaaggaatggctcataagcaccaaaggcaaaatgggcatggttactgtaataagcagcagggctggagtgggtggtaatcagatggtttgacctacagagatccttgggagtgactaatggattgtgggtttcctaagaattgaaattggtcattctactaaagttttactgatatgtattctgaatctggatttgccttctctgcctgccacatttctgctaatccctctatccatagacttcacgccttactcattttcatggaaccaaattcaagcctgcttctgatcgaagatctcattttgtagcaggagaagtgaggcaagccttccagttaatggtggcagataaaatacacattttaattttgcttccttttgaaagctcactacaattaaagtagatggtaaagagaaaaaaatatatagcataaactctcaggaacatagtatacaacatactctacagggacataacaataccaccacggattctggaaagcaggtgatgtgtgatgagcagcgtagcagtcctgactctaagtcagcagtgggaagcccagatgcaactcttctatacctcagaatccacagagaaggtccagaattggcaacaccaggtacctttaaacatacaggagaatcaaccaccacctggtagaagccaggtgtttcatttccaaagaaggtaaaccagagggctcttgactaagacactcagcagaggtgaaggcagtggtgcagtgtgaacactgggtaattaaaagaaactccatgttctaaatggaaaaccctattcccactcagctcccagaaagctggcaggtcagctatgacctccaaatagagaattgaaattgagggatctgacagcccaagaggaaacaaaaagatatcagtaagcctggtcaaatcatcctacagtgaagccctctaattaacaaggcccttcacacatgctgagtttccaatgagctctttggcgattgatatggtttggccatgtccccacccaaatttcatcttgaattgtggctcccacgattcccacgtgtcgtgggagggaattgaatcatgggggcgggtctttcccttgctgttctcataatgaataagtctcacaagagctgatggttttataaagaggagttgccctgcacaagttctctctctgcctgctgccatccatgtaagacaggacttggctcctccttgccttctgccatgattgtgagccctccccaaccatgtggaactgtgagtcaattaaacctctttcctttctaaattacccagtctcaggtatgtttttgtcagcagtgtgaaaacggactaatacagtgatctacttttttaaatgtttgaaaagacgacttctggcctggacaaaatggtgtaaacttgtttccccctgctccttcctgtcaagtacaactatgaactgtgaaaacaatgcaagaggcaatcagaagataacactgaaagctggcaagggaattatgcattagtttgggaccctaagaataaaggaacaactcagtggcaggatatcttatgtgcccccactcagtggaagaagatgacccaggcctggtgtttccagacacccagcctatcaacagaaggcagccaaaacaggctcagccctcttacaatttgaagaggagtccctctgacaactccacatgagcccagcaccaccagaggggagattactcaggtgccccactaacaattagcaaccaggggaagcactctcctttcacactgggcccgaaactcacctcccctgccaagagagctgggcagcctgacctgggaacaccccttctgccctctcaggcagcaccagcaggaaccagcaggagctccagcagcaccaaagaaaccaagcatatgaaaagaacaccacaaagcatctgaaaattaaattgtcattggaacctcagcccactggaacctcagtcctcagaccgagatatgcatgataaatgtaaacaaggtgactgatgttgcaaccaatgaactaagtaggacccagagtctcctaacatgatggccaaaatatctaagacacaactgaaactcacctgtcataccaagaatgaggaatatcacaacctgaatgtgaaaagaatcaactggcaccaacactgagattaaccagttgttaggattatctggcaaggattttaaagtggccatcataataatgcttcaacaattgattcaaattttattggaatgaataaaaaaatttaaaatctcaccaaaaaagaagttatatagaagaaccaaatggaaattatagaactgaaaaatacaaccacagaaataaaagcctactagatggcctcaataggggagagatgacagaagataaaatcagtgcttgattgaggacagatcaatagaatttacccagtctaaacaacaaagacataatattgtgggaagaaatgatatatatatatgtgtgtgtgtgtatgtgtgtgtgtgtgtgtgtatacatatatatatacacatagagagagagagtcagtctcaggggcccataggacaataacaaaaaaatcagtgtttgtatcactgcatatcattgcagtctcagaaggagaggagaaagaatgaggctgagagaataactaaagtaataatgcctgaagacttccaaaatttggttaagacacaaaccagcacatccaagaagctgagaaaaccccaaacagaataaacccaaataaatccatgccaagacacatcataattaaacttttgaaaactaaagacaaagaaaaaaatatcaaaagcagacagagagaaacaatacatcacctgtagttaaacaccaattcaaatgacagtggatttatcatccaaaactatggaggccatttgggaggcctacgcgagcagatcacttgagatcaggagttcaagaccagcctggccgacatggtgaaaacccatctctactaaaaatacaaaaattagctgggtgtggtggcacacgctggtagtcccagctactcgggagaccaaggcaggagaattgtttaactcaggaagcagaggttgcagtgagctaagatcatgccactgcactccagcctggactctaacactcgctggacacagtgagactccatctctaaaaaaaagcaaaactatggaggccagaaggaagtggtacaacatatttcaagtgctgggggagctatcagctgtgaattttatatccaatgaaagtatctttcaggaatgaaggggaagtaatcccagaaaatccccataaaatgcttacaggaactaatcaatgagttcagcaaagttggaggatataagattaacacacaaacattaattgcatttctatttactaacaatgaacatgaagaaaatgaaatttaaaacttaataccatgtacagtcactcaaaagaaaatgaaatatttaggcaaaacacatagaggatatgtatgccaaaaactacaaaatgctgattaaagaaataatggaagagctaaacaaatggagagacagagtgtgttcatgtgttgggagacaacatagtaaagatgtcaattctcctcaaactgaattataagtttcattcaatgcctatcaaaattccagcaaagtttttaatagatttagacaagcatattctaaaatttatatggaaagttaaagaccctcgaatagttagaataatcttgacaaagaagaataaagtgggaggaatcactctacctgatatagctacagtaggcaagatcatatggtattggcaaagggataaacatatagatcaatagacccgaacagaggacccagaaatagatccaaataggctcaaccgatttttgacaaagatgcaaaagcaattcaaaacttttcaacaaatagtgctggagcaattagacatccatagcggaaataataacctcaacctaaatctcacaacttacacaaaaattaacttgaaatggatcgtggacttaagatgtaaaacatctaaaatgactttgagccaggtgtggtggctcgtgcctatagtcccagctcctcgggagggtgagacaggaggaggattgcttgagcccaggagttctgggctgtagtgcacagtgctgattgggtgtccacagtaagttcagcatcaatatggtgaccccctggaagtgggagaccaccaagttgcctaaggagaagtgaactaacacaggttgcagatggagcaggccaaaactcccatgctgatcagtagtgggattgcacctgtaaataaccactatactccagcctgggcaacacagcaagactattgtctcaaaaaaaaaaacttgaaaaagaagaaagttaatggtctcccacgtcctgatttcaaaacttactacaaagcgacaataatcaaaacagtgtggcactggcataaaggcagataatagatggtgatagttaattttaggtgtcagtttgactggactaagggatgtccagatacctgatataacattatttccagtgtgtctatgagggtgtctctggaatagatgagcatttcaatcagttgtgcattgttgatgggaatgtaaaacagtataggtgctgtggaaaacagtatggcagttccttaaaaaattaaaaatcggccaggcacagtggctcatgcctgtaatcccagcactttgggaggccaaggcagctggatcacgaggtcaggagatcgaaaccatcctggctaacatggtgaaatcccatctctactaaaaacacaaaaaactagccaggcatggtggcgggcacctgtaattccagctacgggagactgaggcaggagaatggcatgaacccgggaggcggagcctgcagtgagccgagatcacgccactgcactccagcctgggcgacagagcgagactctgtctcaaaaaaaaaaaaaaattaaaaatcaaattaccatgtgatctagcaattccacatttgagtatatacccaaaagaactgaaagcagggccttgaagagatatttatatacccatgttcatagcagcattatttgcaatgcccaaaaggtggaagcaacccaagtgtccactgatgaattaattaataagctaaatgtggtatatatattattcagccttaaagaggacggaaattctgacacacgctacaacatggatgaagtgtgaagacattatgctaaatgaaataaaccagtcaaaa

SEQ ID NO: 934 - DNA, 9683 bp, Homo Sapiens
actttgtaaggaaccgctggcagtcggaggtctcactcccgcctccgcgtctccctggccggcccctcctcccacccgccggaaggctcggggtggggggcgctctcggcccacgccgggcagggtggtcccccgcctccccaaaaggtgtgcctggccggggcgcggcggcaagtcgctgcaggcgccgtcaccgccctaggggagggaggacgcgccctcctggcggtggagccggtcccgccaccgagcatgcccagaggctgccgggcgcggcgcagtccgcagtcccggttttcgcggcggcaggctggagcaggaggcaggctgggatggggttggaggggccaagataggcccaaaagaagggggcactgggcgttaggggcgcaggtccagccagttagcaagggcggcgcgctgggaagagtggtgtattttcacgccgacacccgtattttcttggcttgcctcaagccgtctctgcgtgactcgttaccccgccgaagccacccggcatcccaaagcacgagcctggcgcctcctattccacgcggaagtgcccgagtgaccctgtgaaggacctccctcccctcacacacgcacatacacaagcccatgtgggagcccgagtgacgtgtgctcggtggtcatgcaccatcatttcccttccaccttcctcctcgccgcttcctctccctccaccgcgcagctccagccgccttgccgccgccgcatccccttccaagttcaggctgtgggtggaacctgttgctttagctcacgtttcccttcccctccgggctgcacgctgaggatgacctcagcgaggtgtgtgtaaggggaatggagggtaagtgcgagaaaggactcctgcctggcaaggagacaggggaagcgggtaggggcgaatgttctaaagggttgggcgagccaccagagactctttccgccacctccaatcaaggggaccttaaaggaggggaagaggtagatatcaggtgagggtgcccttggcacatccgctgcctttgcttccttagatatttcaggtacctgagtcaaacctatgctggcgttttcaaaaacgtacgggctgcctgagtctggcagctaatctcctttggaagaaggttctattaaatgaaaaataccaacacttggaaaaacatagatgcatcacagagcgcctactaaggatttcctgtgaaccaaccattctgacctgtaagaactgggaaactaggaaatgcccttttctctgtggtgattgtgaaaaatattacttaattttataacaaatcggagagaaccaatttctctgaacttccagatttgggcctgttgctaattgttcccagtgaattctagcctggaccaaatgaattccctggcgtggcacagtccagatggaagaagaggggaatgcatgggattcctaagtagggagtggctgccaccctgaggattcttctaagccctagtgggatgtggtgctgagatcctttttgaagtgatttctgtgaggcacgactctcctgtgctaggtagacctgagccagggaaggtaatctaacctttcaactcctctggaagcagcaatcttaggaataactggaaaaggggccttccggtctggccagctgttttgtaaaacggtactgatgattatttaaattgtcttttatggtaacatctgtaaacagcctgtcttgtgctccaaatacggtttgattttgagattgctgtggagccctgcctgccactccagcggggtggaggtggccctgtgagtaggaagatgtaagtaggaaacatttggtgtgctgggaattagatagctgtttttcagttcaccatatgacatggcatggcttagatcacaaaaagctccctgctctgtggcaggacacaggtagacagataagtactgatcacctggggtgatgagagagagttgtggtttcattccaagttttgaatattaggacctcctcagccacccacccagactccctctgagctctgggctcatccccctgttgcccagatggtccatgttcagggaatgcaaaataaggcctaagaaaaatgtttggcaaagtaagtctagtgccaaaaatgcatggcatttcaaagccaaatataaacatctttgaattacctgtacttttaaattattttccgaccagataatttctggatcagatgggaaagtaccaggtttcccttcttttctcttcatgcaaggtgcctggctagcccagtttcctttctgtttccagccttccatctcctgccaggaaccctcccactttggaacaggaagccctgccaactcctaggcccagcaacagcctgcagatatgtccagcaggatagggagatgatttgcaaagtgattgaaagattctgtcttcctgtttacagggacattttttcaagttaggagcttggagctttcagacttagatttgtctcttgaaacctttgtaaattagacatcagaagtgtgggataagcacctttgtgctctggctccagcacctttccccatcaatcaacaagtcctgtcaattctacgtaagtacaagatccctctcaaatacacactgcccccaccccagtctaggccgctgtgtcctgaaattactaaagtttcccaactgattcctgcccattctcttcatgcagccagagtggccttactaaaatgcaaatctgaacaagtttctcccttgcttcattaactactcccctacccacccaggtctactcactgctcttaaaggaactgtttctcctcctccaccccacttcttttggtaaatttttactcatccttcaagtctcagcttaaatgttacttcctcagggaaggcttgcctgattctctgtacctgcccttactgggtcgggtgacattcgcacgtgcccgtgacactcactgcatttatcttatgcactgtattgaggttgctgtttaattgctaatcttctcactagactcataagaaatacttttatatcaagacataggccaaacattcatataaaaatatatgcaagggaaagaaagtttcataaaactcttattttgtaaaatcatattcgaattcatgtaaaactaaatctggtcacaccttactgcattgacttcccaacccttagatgggtcagggcttctagtgtgaaaaaaatactctaaattccatgaagtgggggacaatttccctcattcacggtaattggaatggaataggagcttaacaggtatttgttgctggaattattaacgataatatctaattcatataatcctcgatcctatgaagaaactactattatccccacttacagatgaggaggctgaagacagtgaggttaagtaacttgccaagtgtcaaaaagctggtaaggtagatggcagagccaggatttgaacctgagtagtttgcattcagaattcttgtcctagtcactcagcttagtatcctttggtcaaggtgcatgtgaatgaatttaccaagcaaaaatgtcagaaagggtctccttgcagctacttcaaactagatctcagtctgccctgcagaggctccttgggcagtatttatgtctgtgcagtgaagaaggcatctggcaagaacagctgttcccctttgctcacatgtactcaacctcctaaaccaccaagtctagcaatatttagcaagtagggagatttaattgtataaaggaagagtatagatacttccaaaaatgcaatttcacattgttatgaactatgtgctgtatatcccccccacccccctgcaaaacaaatcctttaaaaagaaagccaccatgagactggggtatttattttgtcatcagtaggaaactgtctagattaatacttaaagataggggtaagaagatcatgttcctcaggggtcagtgctatttataggattttaatctgtaaaggcaacatttgagaaaggacatgattgaaatatttgaatcaaagagtatgaatagacaggaaaatatttatttgcagaatttccaaactaattcttatattattagccccgatgctgaaccttaagtcgtggcatttagagtaataaagaaatggctggcaaagggtttgtatttcatctttattacatgaattacatgcaggtcacatgcaatacacagatgctctcctatttaatcacctgaatataactacatggagatatttaacagccctgtggggtaaagggtcctggatacagaacatctggggtttgtttctggccctatctctaaccaactttatgaccacagattcctcatgaaggagcccagacacttgatcacagtgtttggcaaatagtaacaattaattaaatgaataaataatgagtgaactaaaaagctacttccagcttgaagactatggatttcattctagaaacaatgagaaatatagtataaaaatgtctccgaatcttttcatcaccttccttgttgggtgatacaaagttggttcctccactaattaaaaatccagatctatctctattagacaggttggccttcttggatgcatggtagctctcttttatttctgtagagccaatgggttaatcttaacttactagtctatacgtgtagatactttggagatggattctatgtacacctaaaattattttcttctcactttcacttacagagctatattttaatgaaaatatgtcctttaaaaaattaacatattaaatgtttttattttctagcaaaccacgagattatatttgttttctacattttcctcaattaaaaaaatgaaatggcaaaatataggcaaaatggcacttaaaagatatatccaacaacctattttccaaacttgaaaccaggacacctggcttgacaaacactacagtgcttacagaaagtaggtgaatgtatgtttgaaatgaagattatcctgaatgatctgtagattggcaaatgaagcaaccctagctgcagcagagggatggtgtctttatcagagaaaagtcacacagagggtgtcagtcaggacctcagcatgtggttgcacagattgtgccctgtatagtgccaggattgtgaactatacaacaggtctcctccaggagggaccatttggcaccattcacatagatggcaatgtgaatggtgccctctggagttgtgcagtgtacaatctgcacaacagtacacagaatctctgcaagaattccattggtaggaaatgtgctctcttgacaggattggaagaggcagcctgctgttctttttaaaataaagtcattcctcagattagatggcaatgacaaaaattcaaccaaaatcttgtttttttctttttccagaaggtttctgccactatattctactttccttaagttgctagcaattctcaaaaatgcaagtctgggccacgtgtggtggctcacgcctgtaatcccagcactttgggaggctgaggcgggcggatcacaaggtcaggagttcgagaccagcctggccaacatagtgaaacaccgcctctactaaaaatacaaaaattagccaggcatggtggcgggcacctataatcccagctacttgggaggctgaggcaggagaattgcttgaacccagcaggtggagtttgcagtgagccaagattgcgccactgcattccagcctgggtgacagagcaagactctgtcttggaaaaaaaaaaatgtaagtctgtaagtaactctgaacttactttttgagcttcattgaagagaataaattgaacaaaagggcatttagaaaaaggtggggaagtttgtagacaactgcaagggtcagggaagcattataagtcataggcatggaagctcatgtatacatgactctaatataagatgaaatgtctccaaaaccgcatgccttctactttaaagtgtttagcttatcaaagaggaacattttcacaagatactctaggaatttaaaactgttttggtcatgtcttgacataattctggaaaccttataacgtcagaaaatagcattgtcagtgccacacagcaggaggcatggaggtagcttggtgggacagaggagaactcttcaggatacttggctctgcctctgactagctctgtgtttatgggcaagaccatccctgcagctagctctctgggccactggcttcctcacgaaagcagagttgtatgaaattgtctgagccttagaaactgccagaatttcatgggctgtaacttaggtgcctccaggggccaggcgggtgaggtaaatgagtgaaggggtcaccaccggtgacagggagttccaggtctgagtcattaaagtcactaaaccacacagcacaaaggcatctgatatggtttagctctgtgtccccacccaagtctcatcttgtagctcccataagtcccatgtgttgtgggagggacctgatgggagatgattgaatcatgggggcagctcttttctgtgctattctggtgatagtgaataggtctcatgagatctgatggttttaaaaatgggagtttctctgcacaaggtctctttttgcctgctggcatccacacaatatgtgacttgcttctcctcaccttccaccatgattgtgaggcctccccagccatatggaactataggtccaataaacctctttcttttgtaaattgcccagtcttgggtatgtctttatcagcagcatgaaaacagactaatacagtaaatttgtaccagtagagtggggtgctactgaaaagataccagaaaatgtggaagggactttggaactagggaacaggcagaggttagaacagtttggagggctcagaagaagacaggaaaatgtggaaaagtttggaacttcctagagacttgttgaatggctttgccaaaaatgctgatagtgatatggacattaagtcaggctgactgaagtggtctcagatggagatgaggaacttgttgggaactggagcaaaggtgactcttgttgttttagcaaaaagactggtggcattttgcccctgccctagagatctgtggaactttgaacttgagagagatgatctagggtatctggcagaagaaatgttaagcaaccaagcattccaaaggtgacttaggtgctgttaaaagcattacgttttaaaagggaaacagaccataaaagtttggaaaatttgtagcctgacaatgcagtagaaaaggaaaaacccattttctgaggagaaattcaagctggctgcagaaatttgcataagtaacaaggagctgaatgttaatccccaagacaatggggaaaatgtctctagggcatgtcataggtcttcatagcagcccctcccgtcatagacctgcaagcctagggggtaaaagtggttttgtgggccgtgggccaggcccagggtccctgtgctttgtgcagcctagagacttggtgccctatgtcccagccgctccagccatgtctgaaaagggccaacatagagctcaggctgtgtcttcagagggtgcaagccccaagccttggcagcttccacgtggtgttgagcctgtgagtgcatagatgtcaagaactggggtttgggaacctccacctagattttgaaagatgtatggaaatgcctggatgcccaggcagaagtttgctgcaagggtggggccctcatggagaatctctgctatggcagtgtggaagggaaatgtggggtcagagcccccaaacagagcccctactgaggtactgtctagtagagctgtgagaagaggaccaccatcttccagaccccagaatggtagatccaccaacagcttgcactgtgcacctggaaaagccacagacactcaacaacagcccgtgaaagcagccgggagggaggctgcatcctgcaaagccacagaagcagagctgcccaggaccatgggaacccacctcttgcatcagtgtgacctggataggagacatagagtcaaaggaaataattttggagctttaagatttgacttccctgctggatttcagacttgaatggggcctgtagaccctttgttttggccaatgtgtcccatttggaatggctgtatttacccaatgcctgtacccccattgtatttaggaaataactaacttgcttttgattttacaggctcataggtggaagggacttgccttatctcagatgagacttggactgtggacttatgagttaatgctgaaatgagttgagactttgggggactgttgggaaggcatgattcgttttcaaatgtgaagatacaagatttgggaggggccaggggcagaatgatattgtttggttctgtgtccccacccaagtctcatcttgtagcttccataattcccatgtgttgtgggaggtacccagtgggaggtgattgaatcatgggggcaggtctttcccatgctgttctcatgatagtgaatgggtctcacaagatctgatggtttcaaaaacaggagtttctctgcacaagctctctttttgcctgctgccatccatataagatgtgacttgctcctccttccctgctgccatgattgcgaggtatccccagccatgtggaactgtaagtccaataaacctctttctttctttctttttttttgagagggagtcttgctctgttgcccaggctggagtccagtggcgtgatgttggctcactgcaagctccgcctcccaggttcttgccattctcctgcctcagcctcccgagtagctgggactacaggtgcctgccgccacgcctggctaattttttgtatttttagtagagacggggtttcactgtgttagccaggatggtctcgatctcctgaccttgtgatccacccactcaggcctcccaaagtgctgggattacaggcgtgagccaccgcacccggccagcctctttcttttgtaaattgcgcatctccggtatgtctttgtcagcagtgtgaaaacggactaatacagcatccaaattaaaaatcggaatgaaaagcaggtttcatcctcaattcatccctagatcaccacttggaccccagctcttagctccagatttccagagttccaagtctacatgaacatgaaagagtcagggagactgtacatcttggcttgggcaggatggtcctgctttatacttgttgtcctggcataattattaatggcaccctccttcactctcaaaagtgtcctagtttacatgagaagtcttagagccatccaaagtcagggggaatcagtgactaaacacaaacttttaggagcaagttcatttattcaagtttgtgcaagccttcagatgaagctaagtagatttggcattgttttgtaagtataaagatatttaaataaacttccaaaatatcccaacagaacggttcaataaaagcagtatgtcatgaattttaaaatcatagacaatataggaaaggctatcaatatgtgaaaaattttgaaattcactaataatcaagaaaaatttcaataacaatgaggtaacattttgcctaccagagtatttaaaaattatttaaaactctaataccaggtgtcaggataggtgtgatcaaaggaactctcatataccgctgataggtttataaattgactgatacaaactttctggaatgatatttga

SEQ ID NO: 935 - DNA, 22832 bp, Homo Sapiens
agcagcgcgagaccctcgccaggctctgaagacgcggcctggccctggccgttcggcccttcgtctgagcgcaaaggctccagcacctccgcggccgaagccgcgggacttttcgtggaaaatgggacccagcccgatcgccagcggcgctgcagcggactctgcgggaacctagcttctgctccaggacctccagggccaccccagctcgcagggcgttcgcagcggctcagggcgaatcacgctcatggtccccgtgcgcattttcagccccagccggtacctccttactcgccctcacgacattcattccaccccctaaaggtcctgccaaccccaggctcttcccgagcattcccgcccttcctcccttttgaaaccggagcaaatcacggccgggcggaagcgggggagcccgggtgagagtcagtgactcagctgcggactccaagtgtcgccggaggccctggggcgcaggcccagcgggctgtcgcacagctcggctgtcctgtgccccttcctgacgaggctggggaggaaaggcggcccagagaaggccggaccagctctccccgtcagccccaggctctcgaatgacagcggatgccagcgaccggggatggggtcccggaattgctgggttaaacaagctccggattcaggcctgggcctgggctggggttccagggttctggaccgccctcaaagaaggagctccctggggcggcacctggctctgcttgatagccccagggacagggagctcactacctatcagggcagctcccccagtgccgagaccagctcggtcctggagaccctaacccagcggtgctagaggaattaaagatacacacagaaatatagaggtgtggagtgggaaatcaggcgtctcacagccttcagagctgagagcctccaacagagatttacccacgtgtttattcacagcaagccagtgataagcacagtttctacagattatagattaaaagtaccccttagggaaacaaagggatgggccaaaataaaggggtgggtttggctagttatctgcagcaggggcatgtccttaagtcacagatggctcatgctattgtttgtggtttaagaacgcctttaagcggttttctgccctgggtgggccaggtgttccttgcccttattccggtaaacccacaacctcccagcgtgggcatcatggccatcatgaacatgttacagtgctgcagagattttgtttatggccagattttgggggcctattcccaacaccctagcattgctcacacttgtccctgaagtgtcaccttgtcgtagctgggctctgagccctctgccccagggaggggtggccttttgggctgaagggactgaggacatagccgttgagcctgttggccattgctcaaagaatgcagcctcctggtcacccatgttgtccccttgccaacaaaaagagtgaaacactgtgcaatgtttgaagagatttattctgagccaaatctaagtgactgtggcctgtcacacggcctcagaagatcctgagaacttgtacccagagtggtcagcctgcaactgggttttacaaattttagggagacataagacatcaatgaatacttgcaggatggacattggtttggtccagaaaggtggggacaactggaagtgacagagggacttctaggtcataggcagattcaaagattttctgattggcaattgattgaaagagttaagttgaccgggcatggtgggccatttctataatccttgccatggggaggctgaggaccatttgagcccaggagttagataccagcttgggcaacatagagagacctcacttctccaaaaaaaaaaaaaaaaaaaaagttattttttaaagacttagcattaatagaaaggaatgtctggttaagataaggggtcgtggagaccagtgtttcatgatcagatgaagcctccaggtagcaggcttcagagagaatagattgtaaatgtttctcatcagacttaaagagtctgttctctcagtctttaaggggtgtgttgatgttactgctggtcagctgggcctgaaatccaaagggaggagggtacagtgaggcatatccaacacccatttcctgtcgtggtctgaactagtgtttcaggttaaccctggactgcccttggtcaagagcaggggtgcattcagatggtgggggtgcttagaatttcatttttggtttacaccactgtgtcctctcctgccaggggagggacccagagctggaggcttagccctggagataccggtgaagatggatgaatgagaaaccagttggagcttccaaggtctctacccaccctccagacctcctctgctcctgcccctgcccattcattcccaacttctgctctcccagctcccctcccacccacatgctgttccctcctcttccatcttccgcttcctgggcccagagactgggcaagatccccagggctctccttgcacagcgaacctctcccagggtgcatagccttgctgcaatcttacacagggaatacataagcaaggaatacttctgtccctcttggactctgaagccagaaggccagggcctggttggcctcctaactgctgtgtcccagggccagagcagtgccagacacccagcagtcttagcacccacgaaagctggagggacccacaccttccccatcactcagttgcatcagtctaacgcaatggatttgggcagcttgtggtggttcactggcagtttattgggggacttgaaggagtcaaggtcaagtgggggacttctgggtgccagacctggcccttccttggcctgggcttggggtgtccaagcccacagagccatgcagggggaaagagctaggcaagcagggtggttgaggaggtcattagcgtggcctcgagggaaaacaattccaagaggagcccaaattcgaatgtcccctggtgtcattgagaatggagagatttaggttatgaattgtgcagttggtgggtagcaagccagggtcctgaagatagtctgcatatcccctggtgtcattgagaatggagaggttcaggttatgaattgtgcagttgggggtatcaagccagggtcctgaagatagtctgcatatcccctggtatatatcatttatataaggatgttacttaactattgctgtcttccagaggcagcttcttgaacaaatacttgaggtcctctataggtttacgggagtagactgttttctccaagcaggcctgtcgtccatcaggagaagcaaaaggttttattctagagacaagtccttccaactgtacagctgatggagtagccaaggaaacctggtctttccagagacacatagaaggtgccatctatgaggaacaggccttcaccagacatcaaatctgttggcatcttgatctttgacttctccaccgccagaactagatcaagacatgaaacccatgttcaagatactttccagtgtgtcttcatgtgatcctctgagtccagccatcaggctaccagcagctcttggaaaccctgacatacttattcttagaagactgctttccggactcaaagtggaacctcaaattttcaattttctttgtttttaaagcctacacataggtgatgatatatacatgcatatatattttggagaatttataattctgaaaacaatgctggtcttatggaacccatccattcccctttccccgtgtgtgctccgagctgtggtggcacgtgaaaaggggtccttccagcagtggcccacagccctgggctgcttacttgctcacttcatttacaagagcaagaaatacacattcttgtgttgtttaagtcattatgatgtggggatttccattactcacacacctgatctagtagtaacacagtagcctattttagcaatatcatttattcaataatccattctttccccattagttttgagccttcatttattgtgtactaagttctggttatttttagtggttgtaatctccttctttcctactctcttaatcatgggattgccaatatctgctctgtgtttctgtgccatctatagcctctggccttggtactgcttcaaaactgatatttctaaccttactttgacttctccattcagtgaagttcccatagttcatcactcaactgctctctttccatcgtgaccttctgaactagctcacacccagatgtacttttgttatctgcctttccccctcataaacatgggctgctgctggggaaaatccactaccgaactcttgcaggtctctgcaaatgtttaatgccctgtcttagccatgacctccacaatgctgggctatcctatgttatgtcccctaagatatcccttctctcttacctttggggatagtcctaagcttccatcatggcactcaaagtccaaccttatttgtaccctcattctctgagcagacaccaccgtattctgtttcacagagaaaatgtgactgctggggataattctttcaacttcctggcctcttcctatacatgatctttctctgtattcttgcctattgctcttccatgttgatagaagtgtctgttctccttgtcagtgtctcggccttggatctgtcccctagactattctgcctgtgtaaggaccttccctgaccagctgggccaccatctcctgcttctccaatccctcactctagactgactcttaacctttggtcaacaatacttgagcttttacattcataatggagcatctgtgttgaaccttgttcttttctagacactaccctccgttctgtcttccatccatggtgacttttctagaaagagcatctatcacactggagacagcaaactccttgatccattctaattcctaaccctgcaataattttctatctcccttactcaagtaattgggagtgctcctagtgttaccagagacccagcagttcccaatttcgaatttttccgtattcacatttcttgacttgctatgattttacatcacagattacatccttcatttgaagagactctaatggaaggctgccatggaaactctctcatgtggctgacctcctacctcacttgctctttctgaatgaagttcccacttttgcctgccttaatgaaagtaatgctccccaaactcaagcccagggctgcgaattggaagcagctggggctactgtttctgggtgctggtgtgaatggcaggatgtgaacaccagcctgtgacgggcaaaaagatggacacacaggcagagcctgacaggtgctggtggtcctatctggtcctgagttgctgggaccctccttgcccactgcccctagaatggactttggcctcaggttcgaagtgttcagatgtgactgagatgagccttttccccatgcctcaggaatagcgaagaaactctatctggaaggttccccaggcttccccacccagcagcctctggtattagaccaggcagtggctggccaggatggtggggacagaagggagacaaaggtgagcagtgggtggggtcacatcctccctgacattgaatagacaacatggggaggaaggatgagtgatctttagaatgttcatggaaaatgcatattgggaaaaagaatgcatgaatttcaaattgttttgcaacaaaataaacttgtactaacttgtgaaaacacgtccgaacaggatctagtttgaggccctaagaagtataagacaacagtttgaacagagctcctatcagacacatgaattctgctaaaattgaaaccagaacaaacatgcaattgatggtgaagcttggctggaaacatggtgaaatcattgatgatttattgaaagtttatagggacaatgcctcaaagaaatcagcaatttaagtaagtggataactcattggaagaagagaagagatgatgttggagaggaagtccacagcagcaggccagccacatcagtctgtgaggaaacaattcatcttgtttgtgccctaatttaagaggactgattaatagcagcagaaacaatagccaacgctgtaggtatcccaaggtgttcagcttacacaattctgactgaaattaaagttgagtaaactgtccactcggtgggtgccaaaactttctcccagctcagctgcagataagagaaaagcgttctatggccattttaaacaagtggaatcaagatcctgaagcatttcttcatataattatagccggagatgaaatgtggcttaaccagtacactcctgaaggcaaagcacaagcaaagcaatgactacctagaggtgggcgtggtcccatcagagtaaaagcagacatgtcaagggcaaaggtcgtggcaaccgttttgtgaatgctcaaggcatcttgcttattgactttctggagggccaaagaacagtaacatcttattatgagagtgtatagagaaagtcagccaacgatttagcaggaaaacacccaggaaatcgtcaccccggaaagcttcaccagagagcccttctccaccatgacaatgctcctgctcattcctctcatcaaacaaggccagttttgtgagagtttcaatgggaaatcactaggcatacaccttccaggcctgatttggttacttctgttttataattttaaaaaatctttaaagggcacccacttttcttcagttaataacgtcacaaagactgaagtggcatggttaaattcccagggtgcccaattctttagggatgaactgaatggctggtaccattacttgcagaagcgtctcgaccttgatggagctcatgctgagaaataaaacattttttaatttttatcttttaattcaattttttcgtgaacttttgaagtccccttgtatttgtttttggtggaactttgagtctgatttctcagctccccatggatggctgcatcttaacagagaaatgaacgccatttaccctgatgctctctacttggcctaagtttcagatgttgaacacacacgtgtgggaatttatgaatctgtgcacctgtgccagctggtgggtgaagtctaagtttcttcaacacaattagttatcttctgcctcctggaatctggtaggaaaggttgaggaaaagcagccatccacagcgcctccaccactggaatgggggcagccctaacgtgtgccccactgccccccatgctgaggagtccttcactccagggatgtcttcaccccaatcattcagactcccccagtgttcctgcgtcacctgaaaggtcggaagcatctcagcacatactctccatgagtggtacttaggcctccctccccatcaatactgaagccctcagaggcagaggggagtcaaggaaaagagtggccatcagcaataaatgagttacaaggtttgatttcaaagagaaaaacttgtcaccaaaatcactactcaggagatctggacttcctctgaatgtgagttaaagaacccttgagggttaagagccaactgcacctgatccccactctcccatcccaagaccctgggaagtcaaaccaagaggtaatcaacagaaaacaagtttaatgcaacaggtgacaacggtctggagcgagtccatgctccggaaggctcagtctgtggcagtcccgtggctcaagacaggctgaggccggctgcaatggaggccagcagcaggaggatggccagccacagcccaccacagctctcacccatgctcccagcatattctttgaacactgatgagttgataggtggcccctctaaattgcagtagcgaattttacaacacttgaggtaaaagaagggcatgggctcttccaggagaaaccgcttctcctctggcttgggtctctccatcgctgcacaaccagcggagcactgcttcgcaaccatgaaaaaacgtggaaatatttctaataggaaataaagaccgagagaaggcaatcacgcaattccaatgcctgacaccgaggcccttctgtctgggtcaaagcctcacccctggcggccctgctcaaaggtgcacagtcaactggggcaccaagggggagtcgggaggacgagggccaggcctgtgtgttgaatgctgcttcagggaagggctggcttctgcgtggtatggcctgtccatatgcactgggaatgcgggtctaggggttgctgtttgggaacaaacaggtctcaacttctcaaacacagggttggctcaggcctttgtgaccacagacagacacatgactcccagccattctggccatcacccagggtgtggagctggcctcttggtgggcctggctcgactctgagctgggggtcttgtctcatgaccacacttcatcttatacatcactgtacaaatcattttgccatattaagttataaagtcgatgtgggccacactgagtctgaagcatcacctcagcaccccaccaacttcgtggataccgaagggctggagagtgactgctgggcggaatcagaattcacgagccctgaagatctccctgtgggcagaatgtgctgggtgtccagattccccttggggagggcttcatgtacccagaggttttcaggggaatcacagatgacagagcagtggtctccacaatttttaaggcatgcaccctcctttgagaacacacttgaaggctgtacaccttggttttgtgcatctcttgtaagagtgacatagacactgttctctgtggcgcatttaacactattaaagcttaatttttcatttaaaaatggatgatatgaaatccagattttcttcctacctcccagtatttcatctggacccactgtagcaggcactgccttacactagcacagttcctacacctctctctggcctctgaggactttgctcttcacattttaaagggaaaaaaaggcagggcgcggtggcttacgcttgtaatcccagcactttggggggccgagggcgggtgggtcacctgaggtcaggagttcgagaccagcctgaccaacatggtgaaaccccacctctactaaaaataaaaaattagccagtgtggtggcgcgcatccataataccagctactctggaggctgaggcaggagaatcgcttgaacccggaaggcgaggttgcagtgagccgagatcacaccactgcactccagcctgactccgtctcagaaaataaaaaaaaaaaaaggctactttctattagttattccccattgaggaaaactagacagccctgattcctgaaagccctctgttcacctgcctttgggtccccaacaagagcgaagatactcactcacggccgctataacgcagtatggctctgtccatttgcacctccttgggttctggcactcgaaagtgttttctctctcacaaacatgacaccacactctattgtcaccctcgtctgaaaggaggaataaaaaagaaagcagaatgttccagttctccgtgcctatctgatgaacacagccggcatccgaccagcacaaactcggcgggtccccatccttctccccctgagcagtggctggggccacatgactcgagtgagccgcatggggagaaagcaggaggggtctccggccacgtaagagctgcccgcttccccttcgccttcccccatgattgtaagtgccctgaggcctccccagaagccagcaccacgcttcctggacagcctgtggaactgtgagccaattccacctctcttctttataaattgcccagcccccggacttctttacattctgagtgatttttcttctctcctgggggctcccccgtcctcccacatccaagcacacaacatgagcgcacagcgcacccccactcggccgcagcaccctgaccccaggtcggccacgcggcacccacgggccctggcatctcccggccgacggctgtggaagtgaccctggggcttgggtctgctcccacgtgccctcccgcccacctcccaggtccacccacctcccaggtcctgccccccgactccctcaaaggagttctcccttgggtctgggttgggcctggcctagctctgcaggaggagccggccctcctcccgcagcttgaacggttctcagcccgtgaagcccccggaggccaggccggcgggagcctgcagcctgagggctcccggggaagcgcggccggagcggggcaagggctggggaagggccgggctcaggctgccccgccgccctggtggaagccgcacgaggcgaggctccccagaggcttccaggcgccacgggccgcctgaacgctccgttctcacggcctggtcggggcggtggccacgcggtgccaggcagacgccgcccggccctgtcctctcggcccgtggctgtggagggcgagccaggctcacccgttcgctgggagtcctctggatctcgttgtctcgcagtcaggttggcgtctgtccacacccgcggtagggccacgaccagcagcaaggcgagcagcgccatcgtccccagcggtgcccagggagggtcagcgcgcggcgccccctccccgcccttctggaaccttcgcagcctccgcgcgcctctccccgggtctggccggtagggggagccccgcccgccccggggcgcgcgcctcccacccgccggggcctgtcggggtctttggagcctcatctcagggcctcgcggccgctggcggccctgaacgccggttctgagtcccgccttgtgctgctgttggagcggccggcggccaggcaggaacgggcgcgggagccctgggaaaggcgcgtgtggaaacgcagcccctgagcccaagggccgtctccttgaggaccccacggcccacagaaagtggccggcggccaggtaggggatcttctccgctgaagagcacgggctcacctctgataactcgcccctgaatagcttttagctcattataataccaaaaaaaaaaaaaaaaacaaaaaccacatccctggggagagattccagatgctaatgacacactccagcgcactagtgtgtgaggtcacggtgcctgcgtgccctgaggacttcccaaaacgtgcttactagtaaggcccctgcctgggccgttcgtgagtaatcctgtaaaactctcatcaagagggtctccccagcgtgagtagcgactgactcattcttttgagcagttcctctttcaagctgtactgttttccttaactaaaagctcaaataagaattcctcctggcgcctgtagtcccagctactcgggaggctgaggcaggagaatggcgtgaacccgggaggtggagcttgcagtgagccgagatcgcgccactgcactccagcctgggccacagagcgagactctgtctcaaaaaaataaaaaaaaaaagagaaagaaaagaattcctcctaagtcactagcttttggctctatctcctgagtggcaggttctgtcttgtctctctgagatcctgactctttaaataaaggttacttaaccctatacctcttgctaggcatctcttgtctgaattccttcctccaagaagactaagaactggaggatttccatgcctctcacagtgacagtgctacccaaacatcagggttgtcatctaggccccctgccctgcacagaaagccaatcaccaacagcagtgccagggaagaaggcctcattcaagtgctacagcccagagatgggcgctcagtcacaaatccctctcctcagcccactaaaattagaagtttccagagcagggaagaaatgtcaccctgtgtgggaaaacaggaattagggagagtgaggaggcagctaggcagtcatgactggtgaggggtctggcctcaaggacctactgagtttcagcgccttgatactgtctgggaggcccgatggttggtttcctgagaaaggagctcagataagacaaatgtaactttcccaagttttaagacagggtgggccaatttctatgtttattcaaaagaaaccctaaatactagttttacgagaaattgggcccatgtgagtaggccccaaagggcaatccacaggtggtgttctccaccctgctttctcctctcaaccctctgtatagaggccctctgttaacacaggcaggagcaggaatttcacactcttttcctttctttgctttcttctttgtcttttttttttttttacagttgtgatatagtttggatctgtgtccccacccaaatctcatgttgaattgtaatccccagtgttgggggtggggcctggtgggaggtgattggatcataggggtggtccttcatgaatggtttagcactatccctttggtgctgttcttgtgatggagttctcacgagatctgttttttttaaaagtgtgtaggcaactccctttcttcctcctgctcaggccacgtaagaggtgcccgcttcccctttgccttccatcatgattgtaagtttcctgaggcctccccagaagccagcaccatgcttcctgcacagcctgtggaactgtgagacaattaaacctcttctctttataaattgcccagcctcaggtatttctttatagcaatgggagaaaggactaatacaagttgcatcatattccatggcctggatgtaccatagttaatttaaatagcctccttgaatgaacatttgtgttgttcacagtgtttttatatctcacatgtcaaagtcaaatacattataggatgaatctctaaacgttttattcaggaatcacagaattgtaattctgggcgtacacagaccagaaatgtgtttggtgtgtctgacgaacaaagagaaggttgaaagttttatttaagaaatgttacctattgtttagaaagaaaacttgtgggccctggtagaggtttggggagctggcaggctctgatgggtgagtgacacagtaggtagaccttgtctttgagtcacggcaggtcgttccagcagctgttaggtgcacctgattgtaaagttgcagcaggcgtttcagcacttgggcttgcagatggttcttggagcaggtgctgtctgcctgagtggttttcctctggccctctgccttgacttagtcgggtatgaccagaataactcaatttatgaagtcaactttcatatacatgacgctgcaattgtccctaatgtcattccttacatataccattataccacagctttccagaaatgagatcaagggacaaaagttaaatatatttgcagtttatatgagtattgcccagttgctctatctggtctttggacaattttgtcattgaggagtgagtgcttgttttcatggtggtgtcagaaagaatgtcctcttatttactctttggattttcaccaatgtgacagatgaaaatgaaaatagtatccgggtgtatttttaatttgcatttttaaattataagtgagcttgagcacttgatatggtttgatatgtttgatatggctagtggatatttgcattttcctgtgatctctctatttatgtctctcgtccattttcccgtttaacagacattgcttaacagaagacaatatttgagttgctgaccaatcccgaaatagttgtgaggtatgatatcagcaggacttgttttccgagccttgatcatgaccctgtgatcaaaacaggatataacaaagaaactggcccaaaccagctaggaccaagatggtgacataagtgacttctagttgccctcattgctcattatatgctaattataatacattctcataagacaccacatcagcaccatgacaatttacaaatgccatggcaatgacccagaagttatatggttcatatatgatgccaaaaaggctcattacaatggatcttgggagtaatttttcaaggaatatgaacaaagtcttccctctgtggttaattcatgaatgctgtgttggaatattctggatggtccagactttcctctgtaatcgacgttgagccctgcacaacttcaggagggcgccagacctcactactctcaaggaaaaggctgaagtggaggaattgattcccactgatttttttttttaatttttttgagacagagtcttgttctttcaccaaagctggagtgcagtggcatgatctcggctcactgcaacctctgcctcccaggtccaagtggttctcctgcctcagcttcccgagtagctgggattacaggcatgagccaccatgcctggctaattttagtatttttagtagagacagggtttaccatgttgaccagtctggtctcgaactcctgacctcaaatgatccgtctgcctcagcctcccaaagtatagggattacaggcgtgagccactccacctgaccttgattttatttttaaccatcctgtctgagagattatttgtggaggctgacagcagatgtgcagggttcaacagtgcagtatgctgcatttcttcagctatacctcatattgtaaagactgtccaggtaactcaacaagcgggaggtaagggttgcaggtgggatactgtagtacaccccattggtctaaaggcacatttccttcttttccacccactgttgcagtccagccaggcataactttaggagaatgtggttaggtaaacatgtgccatttggcacagggatatttgaatttcctggcatgaggagtggcgggacttggactagctaaccatgagagtgagttagtagagatgtggatgccgtcatgctgatggcctgctcagagtagcactgggctgtattcgcccaaacacccaacagagcctggccaaatgcaaggcccagtccggtctggggacttctctggaatgcctgtgccagtataaccgggaatgtccctcaaacagagagaagcaaattattatctcttactgagccctttgctaaacaagaagcagagccatgtggacctatgagagatctggagacacaacattccccattgaggaatacaccgcccttgctattctgaattcaaatgggtccctgaaccaataaaagcatgaatgtattttcaagaggtggtgcatgcagcttcatgcaggcctcctgagccagtcgtccagatgtggttaggaatgtctgctatcaggacacttgctgcctgggaacccttggcagaggccagcactgccacccagcagggacctctggtgtgttgcagctgctcctcaaatgcctctggaagacaatagcaacttacgacttccttaccaggaaacagcatcagatagccttcaaaccagaaatgcctctcatgtcttgatgtcagagaaccattctaccaagaggaggagcagcccagcaaagtccatcaaacggtgagagtatattccagagcagggggcaggaggacgttaggggagcctgtggcttctgcagcagaggcaatagcagaaggagaggagagggaggagcagaaggagagcagagggagagcagagggaggagccttcaagggctgctgtgtgttcggagcccagctaaagccaagcaggcctctgagctccctgctaggagttcatgtctgcagggcatgtggctgcttggaaattagccatgtagacctcacagtctgtctttgccagagaaaggcagggcaaaccatattatacacctttataacattgtttcaaatccagaagtgtgatgcctccaccgttgtttttctttttcaaaattgccttggctattttttttttttttttttgtggttccatgccgattttggattttttttcttttctctcttttttgatggggagggatggagtctcactttgttgcccaggctgcagtgcagtggcacaatcttggcttactgcaacctctgcttcccgggttcaagggattctaccacctcagcctcctgagtagcttgagactacaggcgtgtgctaccatgcccggctaacttttgtgtatttagtagagttgggattttgccatgttggccaggctggtcttgaactcttcacctcaggtgatccacccacctcggcatcccaaattgttgggattacaggcgtaagcaaacgtgtccagccagatctttcttctatttctgtgagaaataccactgaaattttgatagggatcccattgaatttgtacattgcttttgatgggattactagagaaacaggagtgtaggagagccagagtgacgccattttaaagccaattccattttaaaacaagcaaggcaattccttgccagtcacagcccatggtcacaggtgttgacagctaaggagggagtttagtaatgcctgcaaggactaactcctacagcaacaaaatgtccaaatgcgccaatatctaataacaatatgtgcttttaaaataattagaatcatgctttgatgtacttactcactaaaatcccaaggatagtttactttaaatcaacaaagtaataagttttgtcacgctgtcaacccacccacacatagacttaacttagcttttacatagataagacccctacatgagaggagtttaaaacaaagacaatgcgttcctcctcttgttttctgaggatgccctactctgcatctgagtagctttcaataaatgatctcttctcactgcactctgtgactcacctgaattccttcctgtgcaagactgaaaaaccctcttccagcaacatctttctggcgatgcactaagggaccataagatgagactatgtgctggggaagttttgtctgcagcaccagttggccacctctggtaaatggggtccttcttggcatcctatgtcatgcttagacaaggatgctcgcctagaaactcaggttagaggctcagcccacaaggttagatgccctggggtatatctggaacaatggaagtctctttgcaagatgtttgtcagtacatgatctgaactaatccaccttgtgccctctgctggggatgggaaagctctacttctcatcatttcccagctcattgctttgctgtactgcagccttggggcagccccaaatggctggtccagaggtttccaccttccagtggcggattctaatgttctttatgtgtttctctctgttcttttctgcctgctttggatctgctgttactaatctgctgccgagtggcaactctgcttatctcacggtgttgaggtgagactcactgtttttggtattactaattcaaggctacctggagattgtcttttcttgtacagttcagccagttctggctaaaatgtatacattaaaaactcatttaaaactgaagaaaaaaatgatgaaaaggttttttttttttttaaaccaaacttccttaaagactactttaccaaaactttggtccacagctttccttggattgcgtgttggatgtctgggtcatttccaattaagaaaagtttatgctatgggaaacatgtttctagaattgtggaagggtcttatctataaagtgctaacatctggcaaacagtgcaggatctcttgcttcctcagttttcccactcacggatgagcgagtgcgcttagctgtcccttcccttcccttcccgctctggtttcctgtatgcaatgtgctcagccttccaagccttgggacacacagggatgctcatgctcctttatgttcccctagggactaggggttagtggacctcacccagaggtgtgggatcctttgggttctgtctgctggggagcctggagccggggatcctccaggtcagccaccatcctgttacatggggctcttcagcctttcgggtcccagggctgcagtgccaccccagtggaaagcccatttgagactcagagggatatttgccagcatgtcctgctgggtctccctcgtccccttcattggctgcatatttgctgtctgtgcctcactagtgatgcccgtcatcctgagcttgcatgctctgaagtttatgcctgccattttccttctcctggtgattttctttctttgggttatttaattcagcatgtctctgggcagcattggaggccaaaagcctcccaggaactagtcttattgagaagaaaaataattttgtctaattcagaagttatctaaaggtcaattcaaatgatgaacttgaaaatagttacttatgaagcaaggtagaaaggagccagtaagtaggggagcgagagatgtgaataaaagttatggatatgaagatgtatttttggtaaggaaggttataaagaatagcaaataatgtatgaaaaaggatctcgtgtggtaaatttttgtcctaaagtaaaatgactaatgattattagtcattagccattaatatgactattattattagttattagtcattaatgactaaatgattatttaggaaagagagaaggttagggcaaggcagaaagtccaagcacatctaagatggtctgtgtacactgggataaagttcgtgaaggggaatttatgaaaggaattttgtatatgattaagttggttataattgaaaggaagccatttataacagtctttctaaaaattggtcgcctacgttaaaacaaagttttcttgaggtactgatttgctgtgaatgaagttacaagaaattttactttcaattttataccccgtttctcttctaaacttctcagatccatatttccgacattccattttttctgtctcactgctttcagctttttcccccttgagcaggcctgagatgatgaccttctccttcagcattttttgtcagctcctgcaccccttttttcctccagttttaactgttggaatgacctgatgctaaagttttatcttgaaggtctagaaaagcaatgttttcttctagtataacttgattttatattcttggcttttcttgctgtgtctaaattttcagtgtaatcagaaaacttctcatgctgttcctaagggtcacatatgctcataaccttaaacactgttcctgtgtctgattgcattcaagcacttctttcctcaagtttgtcttccaggttatctaaatgggcttcctgtaagaagaagcggtctcactgcagaaggttttccctgcctttttattagctggcttaaaaaaaaacaagattttatgtttttttcacgataattcctatactgtctttattagctttatgattgcaaaaaaactgaaagttaaaagggttaaggtttttacctccatgtgactttctctattgcttgttaaagtctttatgattattactcttggttaagtgtataactattacaatgacctgtgattttatgttaataaaatgttttgagccttttaacatcttagagaaatatcctcaaaatcaaaatcttaaatttagtctctgatttagtcttattgctggggcttattaagcctatagaaattaatctctgcaaggtcatagactctttctagaactttctggcagaccatgaagtccagtatcaccacctccagcctgaaaattatatattggaagaaaaatcagttaaaggattccctcagcccccttgaagctgtccttatcaagagttattaaccaatgcttgtgcttagttaataacctgttgtagggctttgactcctggacacacatatctaaagatggcactgacttctaccagtatctgacaaaaactcaagttaactgaaggctcgtctttagacctgggcaaaggggacaacgtaaactgctttcatgagacacaaggacaggtctgtattccaaaacattatgattcatttcataattttgcctttatctgaaataatataatttgttctatgtctatgtggaaggaaaatatcttgggcccccagaatcactaaggtagagggaaaattcaagctgggaactgctcagggcaaacctgcctcatagtcatccctctgcttgtattcatagtcatccctctgctcactgagataaatgcatatctgattacctgctttggaaaggctaatcagaaactcaaaagaatgcactgtttgtctctcacctgcctgtgacccggaaaccccctccctgctttgagttgtcccacctttccagacggaaccagcatgactccctaaaatgcagaaaaccaaactgtgctctgaccaccttgggcatatgtcatcaggacctcctaagtctgtgtcatgggcgtgtgtcctcaaccttgacaaattaaactttctaaattaactgggacctgtctcaaattttctgggttcatatttggtaaccatggggggattctgagtggaggtgcccctgagctttgacaaatcttgtattgatgcttggtacatcatgaactaatttattgctcaaatcaataggacaatttgctgaggtctgcgagctgcccctccagagaatccctgctctcccaaaatttggtcaagatctcaagtttattttggtgtacaactcctttattttggagttttactttcttccaacaaggaagggaagttttcctgcttccgtgataatggaaggcaggtaactcctttatggagtttgagctcacttccaacagcgaagatgagatttttcctgcttctaggatggtggagagcagtcttcagcctgagacccatccctgggtaagtaactgaattggggtttgtcttggctaaagttaaagttaacaaccagctggtcttaatttctttttaccattagagtgttcagtgatcatgtaagttgtgccattgtttgttttgcttaagggttttttttttttttttggtgtttgtttgtttctgtttttcctactgtttctcttgttgtttcagtcttttgcccattgggtttaatcaactctatccaacttgatcaactctgaagggaagttccaaattatggggaacaaggcctctgaagtgactaaattccaccccccgcctcccctccacacacacacacaaaaggtggtatggttgggggagaaaaacagccagcaaaaggagaaaaaaaggaaagatttttgattttgactactaaaggggttttatttacagaacaaggccacttttttgctagcaggccaaactgaaacaatggcagttgccccacgctgtagttccatacctaaggctctgctttcttttcaccatgagagcctgggtttggtgggtttggttcctaaatcaagccctttctggtttgatacttggtacctctgaaatagcagcaattttttctgactaaaatacggtaatgaaatttaaatggattattttaaaaagagctcaatggttaaaagtcagtttaattaaaaggctaacatccaagatgtacgtgtgtgtgtgtgtgtgtgtgtgcgtgcacgcatatgtgtatgtttgtctttgaaaggtcttcatgtgtttgttttttggttgtttttctcctctaggaccttgccttttttttttagcaaaagtttttttcttctcagttgactgaattctgttattacctgattgtttgactaaaatagatactgcacagaggctactctggggtttttaaggaagagtgtagtttagacacttaaaaatgtctttgtttaaaactattttttaagtgcactgtaaaagcatcacgttgtctagcctcataataattcaccctttttggagacccaggattcagtgtgggctctacccagagctcagatatctggttaaaaaaagaaaaacaggtagtctctatctaaataaaatcagtcttcctatgtaatccaacaataaatttctgtaattttattactgagttggcatccatctttaatctttctctagcaccaccagacattttctctgtgtacctgataatgtaaattttgctatttgactttcacctgatatgcagatttaaggctatttagctgacaactgtctagggttctgaaacaggttatcaagaatctgaaagtctaagatatgaaaaaagaggtttttatgaatctataagatgtacttttatcagcatgcctaatatgtctgtatttatgtgttgtgtacacaatgtttcactatgaaaaatatataaaagagctctaattaattggctcaaagtgaaataattcaaaaagcagctatattcattaaatcaatatcaatgatttatacttaatacgtaaatactttatcaggaaaaaaggaaagattagtcaaatgctttttcaagtttgcataacttaagtaaaattattaataaatgagctcgctttaaaattattggtaaagtaatattagaaatgtcagcatacatttttgtttgcaattattaatcaagcaatttcatacttacccctgccaaatagtataagttgtcaaaatttggcagagggtttacaaaactataaacccggcccaaaacataatgatatttgcttgtgtaatctttaataaataagtcattgatattgatttaatgaatatagttgcattttgaatttagtaagattatcataacttctaattctgtggctttaggcagtctagtgcacaggcagtaaggaagtttgttttgagaaaggactgttatagtgtttgtttcaaagctaaactataaactaagttcctcccaaagtccaggaatgaacaaggacagcctggaggttagaagcaagttggagttagttagtcaaatcttttttccctatctcagttataattttgcagtgatggtttcataactttaaatcatgactatcacagttttcataaacaatctaggtaaacaaggtaattaggtaaatgtaatgtgatacatacttgtagacaaatttgtcataatttagaatagaaagttatattaa

SEQ ID NO: 936 - DNA, 1872 bp, Homo Sapiens
gtagccttttcagattggcttctttcacttagtgatacgcgtttaaggttctttcatgtcacttaatggcttgatagtacatttctttttagcaatgaataatattccattatctgttcacctactgaaggacatcttggttgcttccaagttttggcaattataaataaagctgctaaaacatccatgtgcatgtttgtgtgtgtgtgtgtacacaagttttcaactcatttgaataaaaggagtgcaactgctggataatatggtaagaatatgtctaattttgtaagaaaccaccaaattactttccaaagtggctgtaccattttgcattcccacttgcaatgaatgagagttctattactacacattctcaccaggtttggtgttgtcagcgttttggggttttgccattataataggtgtggggtggtatctcattattttaatttgcaatttcctaatgacatatgaggttgaacatctttttatatgcttattgccatttgtatattttcttttgaggtgcctcttcaggatatttttgccatgttggtcaggctggtctcgaactcctgacctcaaatgatttgcctgccttggcttcccaaagtgctggattatgggcataagccaccatgctttgtatattttccataacagtactttttcagaaatgtcttttgcaaatatttttctcccagtctgtggattgtcttctcattttcttgacattgtattttacagagcaggtttttaattttaatgaagtccaacttatcaattatttcttttgtggatcaggcctttggtgttatatctaaaaagtatttgccatacccaaggtcatctagatttgttcctatgttatcttctatgagttttacagttttgtattttacatttaggtctatgatccatttcaagttaatttttgtggagggtttaaggtttgtgtctagattctttttttctttttctttctttcttttttttttttgcatgtgatgcccagttgtcccagcaccatttgttgcacagactatctttgctctatttgtattgcctttgcccctttgttaatgatcaggtggctatatttatgtgagtctgtttctgggctctttattctagtccatagatggatttgtccgctcttttgccagtaccacagtgtcttgattactgtagctatatagtaagtcctgaagttgaatggtgttagtcctctgagtttgttctcctttaatattgtgatggctactctgggtatctttggtggtggtgatgtttgttttaaatgtctccatataaacttcagaatcagtttgtcaatataagaaataacttgctggaatattgattgggattgcattgaatctatagaccaagttaggaagaaccgatatcttaacaatattgagtcttcctaaccatgaacgtggaacattatttatttagtacttctttgttttctttcatcagagtttcatagtttttaaaaaatatataaatcttgtacatattttgttagatttgtacttaagtatttcattctggagggagctgatgtaaatgataccgtattgtgtgtgtgtgtttgttttgagacaggatctcaatctgtcactgaggctggagcgcagtggtgtgatcatagctcactgaatcctcagcctcctgggctcaagcaattctcccatctcagcctcccccgtagctggaactacaggcatatgccccatacccagctaattttttttggtagagatggggtctcatcatgttgcccaggctggtctcaaactcctgggctcaagcaatcctcctgccttggcctcccaaagtgctgggattacaggtgtgatccac

SEQ ID NO: 937 - DNA, 9133 bp, Homo Sapiens
gaccacatcctgcagctcacagccagaggcaggtgcagaaggggcactgtcctctattggcctcagcctctgtggaccagatccctctcaactgatcgggtgcaggctgggctgcaggcgggtagttagtgagtgcctgagatgtgcaggcatgctccaggcactgggaacacagccttgaaccaacagacaaaaccgtctgcatgcatggagcttgcatcctgacaggagggacaagcaagaaacgaagaaataaatcgacagcattccattagttagcacctagataaaagagatatacctatagtgttcaaagcttgagctatgagaaataaaagagcaaaagatcgttttcatcaaaaggactatgaagcatgttatgttttacttaacaaaaccagtgctaaccatgttacatcctccagacttgaagtgtgtgggtgtgtttaacagacacaattttacctttttttcccttttaagttatccgtcaacatttttcagtctctctttaaagagcatcttaaatttgcataatagtcattcatcttaataaaaacattacactgttgttggacattgttgtttcctttcaggtttaactctttaaaaacttctctaactcagccgcagggtgcactgcctcatgcctgtagtcccggcacttcaggaggccaaggtgggtggatcacgaggtcaagagactgagaccattctggctaacatggtgaaaccctgtctctactaaaagtacaaaaaattagccgggcgtggtggtgcacacctgtattcccagctacttgggaggctgaggcaggagaatcgcttgaacccaggaggtggaggttgcagtgagccgagatcacaccactgcactccagcctgggcaacagagcaagatcccatctcaaaaaaacaaaaaacgaaaacaaaacaaaaaaacttctataactcagtgcagaatcgtttaaatttagtactgttgcattagaagagagtggcagaagcaaaactacagggtcgaagggtataaacattttaaataaacaggatatgaaaagttctaaagctcttgatgaagattgacaattgctttctaaaggaatctactctcaccagccacatatgtgggaatgctcgtttaaccagttcctcgatgaatctgagcctcatcttccccagtgggagatgggagctcactgatcctctttcatttttgtctgaatttaagggaaaatttccaaaggacacatggtagaccagttccgtgatctactcaaacaaagggcggaaactgtctctccacattgcagagttccacagcaggaggggaatgctgagtttcaatagctactgcaggaggggagacgaaaacccaccagggcatggagaagtcttctttcttcctgtctgttttcagggaactcaactagtcagtaagtcagaagcagcaacttggcaggggtggaggtgggggctcagtcccaatagcctagaaaagtgcctcctctgtactctgagatcttgtcacacacaaacccagatgagaatcagcttccctgccctgaaaattctggggtctcagccccatgaaaaaataatttcttgcctcggagagcaatcgtgaggataggaagggccaagacttaactgaactctcaaacaccgaagtgcctgaaatgtgtcctgctggcagaggtgacctcacaggctgcaaggcttgcctctcttggagtatatggtaggaacatgcagagatgcactttttggcaggctgacctaggagagccgatgttcaatccaagcagctccaaatgctgaagagaatacaggggtatttgatggggggatgggatggatagcctgcgacagaatgccagccttcagacccaacctagtgctgaggtgctgatgtgcgtgcacacccacccgttcccccagagcttgcaacatcaagactggcctgtggggatctggctaggatgtgcactgactgaaatgtctttaggccaaatcctcttaaatcaaaagtataaacagtgaatttccaaaccctacagaaacctcaaatgagaaatgacagagtcagaaaatggctaatcctccaagtttgtactggaaggtctgaaaaaagatagaaaaaaaaagggggggcctggtatatatttgaaaatccaaaatgacacatcttctcttggaagtgacacttggctggcagatgcccttatataaatatattttctttcggtaattttcaaaatgtgaaatgtccttaaaaataagaataaatgacttgcttcctcctgtgggattactgcacctgcagagtgcagccagctctcatgctcccagacaccaccccaaatcctcatcatcctgagatcaacctcaactactgtgttgagttttgtctcacccagtgtacgacccgcctcctgatatgcatttcactcccactgctcaagcaaagacggttgtcaagacagggctagcaagagtgtttattgagaaagatgaattcacagagattttgaggttcctggctgagtgatggagacctcaaaaaacgcctggtgagcgatttcaggaccttctgtccagagggaaagaccagaacaacttccaggtgagtcctgccgcttcacagggggagaagtgtcaccagattcaatgcaagggttttgtgagtgagaagggcagggggtctgacttggagaaggtatttctctgaaagcaacggctattgtgggagacgggagaaagcacagccagaaatcagaatggcatttgggggtctgggttagatattctggtgggttctcttcccgatgggacagagaaggaaacccacttcccttctgtctacttggtgaatctgcgggtctccgagttgctgtctgctacatctcatagcacctatcttggactggacaaaattagctcaggtaccctgcaggctgagagggaacagctagtcacaggagcctggtttaggggagttcaattgttctgaggttccggggaaaccgatggaggaggccttgggagtccaggcagcgcgcgaggaaatgcgatgccggcccgagcagcttgctgccgccagaacaggcgcgtctggggagctcagtcccctccgggacctctggcctcctctcgatgctccgctgccgcccacctccagcggcccggggcagctaccaggaggccgaggcagtgttcgcggcctgggcccggcaacggaacacggaactgtcgtccctggagagcgaggaggctgagctgatccttcgcgccaggcggccggtgcgcccgcaggccccgtccagcgcccgggctcggaatgagcggtccagcaggaggtagatgagcgggttggcgcagctgttgacgaaggccaggcaggtggcaatggtgaggccccagcgcagcgccagcagcagggggcacggcagcggcagcgcccccagacgcgccaggtggaagacggcccgcagggcgctgaagggcagccaggagcccacaaacgtgctctcgatggcgaagatgatgcgcagcgagttcctccgggcccgacccacgtgcggcggccgtcgcaggcggcgcgagatgcggcagtagcagaagagggtgacgaccaggggcagcacgaaggtcagcagcagcagcagcaagctgaggccctggaaggcgtgggagggctcctcgccgcactggctgtcctggcccccaggcaggggctgcaacccccggtagaccagggagggcaggccggccagcagcgccacggcccagacgccgcagcacgaggccagcgcgcagcgcggggtgcgcagtggcctcgcctcgagcagcttcaccacggccaggtagcggtccacgctcatgcccgccagcagcagcgcgcccgcgcagcgcgtgcccgccagcgcgaagctgctgagcttgcagaggccatcgccgaacggccagcggccgcctagcgccgccgccgcggcccacagcggcagcgtgagcacgaagcccaggtcagctgccgccaggtgcagcacgaaggtatccaccagccgccgcgggccccgccgcccggccagcagccacaccacaaaggcgttgcccagcaggcccacggcgaaggccgccaggtagagcgcggggatgtagacgtagccgtagggcaggtccccggccggacacagctccagctcctccaggccgtccaaccccgagtagtcccagggcgctgaccccgggctggggctccagggctctgtgggggccatggcctggctatgaggcctgcgcggagtgcagccctgggcgcaggcggcagcagctctgagcaggagggggtttgctcttcacgcccggccctgcacctcccttcctgccacccaagccggaggcaaatgggtgggcaggaaagaggggagggaggaggggatggggtgggaggggcaggcttctgtgagagagatggtggcctccgatttggggctgacccgaggggtaagggcagggacaggcaaaaggggcttcacatctaaatcttgggaggaaaagtcttcagggctgggagacctgcccggcctcccagtaggagcgtggcccattcctctattagttgctcagtttctttgttcgtgaaatcgggatacttgccccactgtctcagggtcgcgttgcaagaggtggtgggtgcccgagagccctaacctcttctcagcctccacttcaccccttcccacctgcacccaccggctgctgtcttctctgttttagaggtgagaagacagagccccgggattttatgagtatggggcctaaggcacgccccaccccaaatccacctgttccctaggaaagactccactgccgggacacagcagatctgggtgggtgggggagcccgccctgggcagtcaagcagttgttagcgtcctgagatgtggggctcatgtcttcaccctatgagtggcttctctgacccagtcaggtcctcatgaagccacgcgaaagggttttaaggcagcgaggaaggggtgtagtcagatcatcctgctggaaaggggtgaaacctgggattcacatctgcctcttccctgtcttctcctatcctaaaaaacctgtcaagccagacacagatgtaagctcagttcaaaagatgacacctaatgaaacaccagattagttgtcctaaattatgagtcaggagcttggaggcagcaagatcccttctgaactgagaaactgagagtaaggggaggattcataaagacgagggggaatgaagtctgaccctgaggaggcagtgggacctaaggaggagaggatgggtgagggaaagcttgctctttctcctgaaggaggcatgcagccacttacatctgaattcttcttagcagatatcccttccacaagatattgtggtagaactgatgtcacagtgccctctgagtctgtccccagtgttcccaggtatgagtggctgatgtgccgggcaacccggtgtggaaaatttgaggtggattatcaattttgttcgattaagacttgttaacaatgaactcctccatgaagcaggcactgtttcaggcactgcaagagatgccattcttggccttcgcagtttgttgcataggcaggagagatggttacataagcagaatcttatgtaatcttatgcaggggccaaattgtagtaaatgttaaaaaccaagccctcttagggtttagtggagggggagtgattatttttgacgggagggctgaatcagaaaaggccttcgaggagatgacacttgagatcagtcccaggaaggagctgaaagtcaaataagagcagcagaaaagagaagaaagggtcagactcggaggagggagtaaagggaacaagtataccaaaatgagtaggaatgtgggcttttcaggggacaagcagtctgccagagcccagggtaggaaggtgggggcaggagatgaagcaggaaaggatcatgaggggatttggatttcaatctataggtcatggggagccaggaggcatcgatctgtgttttgaaaagatcgctggcagaactatggagaagggagaggctcaagccagggagaccccatagtaggttgtaattatttgtgtctgaaatagatcatgagcagtggggacagaaatgggagggtatattcaagagataattgtaacatcataggtctcacaaagaggagtcaaagataagcctggggtttctctgcttagggactatatggacgctgtccccttaactgccaagaacacagagaggcacatgtgtgtatgtgttcagtttgatgttgaagtggggtcatgaaataatttatcatctaaccaggatgtttctgagagtgaaaggggcactatcagaattaacctgggccgtaaaccaggactattttgggcaaactgggacataaggtcaccctcgctcagggtccctctggcacacggagatccccaggaaggatttggaaaatggtcttagaggccgggcgcagtggctcacatctaatcccagcactttgggaggccgaggtgggtagatcacttcaagtcaggagctcgagaccagcctggccaacatggtgaaaccctgtctctactaaaaatgcaaaaattagccgggcacggtacgcgcaagtcccagctactcaggaggctgaggtgggagaatcgcttgaacccaggagcaaaggttgcagtgagctgagatcaagccactgcactccagcctgggtgaaagagcgagactccatctcaaaaagaaaatggtcctagagctcacagagggttgggtatgcagtgtttaggctgctcctgtcaagaatttctcccacaccaattacaagatgggcagggaagagaagagcctagggaatgaatggtctggaccttcccttcactggcttttcagcctccgggcttggttttcccctgaagacccaccccagagccgcttttctaatgtctgagcatgtggttgctggtgagcggtgcccacatccggggtggagtagggggctgcagcctcctcccctagaaggctagcaggggcagtgcttgcctgccagagcccagagaccatcagagacagacccagtgttgctggacttcaccccttcaggcacacctcagtctgcgggctcagagagtgtgagtgatcctgaaagctagagatgaacagcagagaagccgccgggtgaaaacaaagaatggggcaagcagaccaagaggggaatataggaagggggttgaggggaagtagaagtaggttattttaaaaatcacagagctacttgcttcctgggccatcatctcatacccaagggaagtctgtggcccagagcatatgctgaattttctctgctgaggcctgggtgctgtccatgggccttactgaacttgtctggatgagaagaaacagcaaaggtcagagccagggacactgccttaggcccggtctcctggggtgcccagcccggtttcagtgaccaaggccaacttcacaagactgctctttcacccttcaggaggactccccacaggattacacacaagtcaactaatagaaacactcacccttacaggctgggaatcctggccatgctctctaacaggtgtggacaaagcagaagaagtcttccctcttcctccatcccacccctgggagccttctctaacctccatccctaagaggacttcctctctctgcactgctggagccagggcaactgttacgtggctccgtcttgccttgcccatgggattatgaacttctcagggcgagggggagcttctttctactcatcagggtgattagcacaagcctgaaaacagaggagatactttaaataaatatccaatgcttcgggctaaattgttttcgagagtaggtttatttctgcccctttacaggttatatttaagttcttataacttattttttctaattttaatttttctgtacaaagaatcttaacattttaagtaaattgtatttgcctttttatgtttaatcataaaagccatctaatacattacagaataaagaagtagtcgtcatcttggacctgctacccctacacaaccaaacttagccagtgaaggacattttcaaaagtatttatttgtaatctcattatttttagattttctatttttaaatattccatttcagatattcttcacattttttacacaggtgtttcaaagtcgtatctgtaattagagtgtacacagtattctcaattaatatcatataaatccacatgagtctatgttgcttaattttctaaacccttaaatatggatatttaggatgtttctagtatttttaactgttatagaaatttgtaatgaataattgcacttatgacttttttatattgtttttataacataaatgctcttgtataagtacatataaatatgtatttatatacatataaatatgtacaaatataacatatttatataaatatgtataaatataacatttatataaatatgttgtaaaacacgttataaatacaaattttgtaacaaaggcaatgaaaatttttattgcttgatacaaatgtttacagtgattagcagtttagaatgtcactggcattgtatgagagtataaggttcaacacagtcttcttagagatgttcatcggtaacatatattttccattgtaataggcagtgaggtaaaatggtacctcatttcaatttgcacttgtttataaataagatggaaaatctatttatttcctaagtgaaccattctaatcatgtccttcacatatttattataatctatgtatttcttattaatttgtacaaactatatatttaggatgagtcatgatttattccacttgattcaaatatttttccaaattcttttcttagctattatttattttagtttgacattttcatatagtcaaatttgttgctattagcaatttcagagtttagaatgttactttctctttgacaatgtaagaagattcagtctgtcattaaaaaataattttcattagtattttaaaatttacctggtgtgtaatcgatgttttcatatttctatccagctttcctaacatcatt

SEQ ID NO: 938 - DNA, 1440 bp, Homo Sapiens
cattgaactgcaaatccccagttaaatcaagattgtgttgattaagctatgtctgatttatggcttaaaagtcacttggttagactcaaacattgttgcaacatgctatatgttattcttaactaacattatacaaaatgcacaataaaggtagataatgaggatcttacacgttatttgtacatttattgaatacctatttataatcacgcatgatttctccgcaactgcattttctccagttaaaaaagaaacaaaaacaatttttttaaacccttgcaagagcaaagaaacaaactcaaactatctcttcaatataactgatttagactctttccatgttacaggtatcttgcctgactccaattcatgttacaattatcactgcaaacatcagcatcactttttgtgggactctcttatttatcatcccctgctttaagaatacactgtgttccggttggtattctcgggccccacaactcatagtattccttctggtgttaattgcttgttgatttgccttgttctaaatgcccctatcatggtcttttccaccctaagtagctaaatatattcaacgctgtcaaccattcctcgattcactttatttccctgaaaaaattttttatgtcttcttgcaaaaagaaatcttgtagtatagtagaattaaaccatgctgcatttataaatatttgctctagtgtattgatggctctcttaaaagctgccattcaggccgggtttggtggcgtgtgcctgtattcccagttacttgggaggctgaggcaggaggatcccttgatcccagagttcagggctacaacgagctatgatcaattgagccaatgcactccagccttgaaaaccctgtctctaaaacaacagtaacaacaaacagccattcagagtaaatagtaggtacaaaataaaatactccttattgtatacctagtataatacagaagttaagaacttggtttttcatatgttagtgtgtttaatatgtactctttagtaaacaggtactggtagcccttggcttttatatcattgacttttcaaataactggcacatggaatactatacgtgtcacctctgaaatgccatttatatactggattttgacttacgaacatcatttgatgaatgccttttttgggctgtttgtgttgctgtcttgccaagtaacccccacctgctacagaactgtgactttgccacttttggcaaaaatttcaaaaattatttggaaaattttattgctttttaccttattttaacaaaacaagtggaaaaaggggaaatgaaagcatctagttatgagaaagtttattatcttgatataaaattgagacaataatcattagatgtgctgaaagtgatgaatctttattggaagtgctgcatggagttaagctgatgaattgtgaaaaaaa

SEQ ID NO: 939 - DNA, 1989 bp, Homo Sapiens
cactacgcccggctaatttttttgtattttttgtagagatggggtttcaccgtgttagccaggatgatctcggtctcctgacctcgtgatccgcccgtctcggcctcccaaagtgctgggattacaggcatgagccaccgcgcccagctgttttgcatttttgtatgatttccatccttcactttatgaaggacattatttatcacattaatgatcaaatatatttatcacaataatgataatagaaaattaaatatttacatttttgtatgtgtgtcttttgggagaaagatacatattctgcattatcttactagtatgaagccttctttatctatgtctgctgattgtgtacacctcggtgccagacataaggaaaaccagcataggccccagagcctgatgtgtaagttctggtcccagatccatcgaaggccatttaaagtctctgaaaatccactctttcatatgtaaaatgtgatcattaagaattgttatgcctacctcataaagttttggttagaatcacatgagatacatgtgaaaatgctttgtcaactaagaacgtgttacacaaagacaagatatgtattattatggttattttctatttctctagtttgactagtttcattctttgcaggacattttcatttttagatgttcttagctattttgcctgtggtgatcagaaggcagatgaaccatggggttctatttctctgactctagatccttttaaaaagctggtgacctttttgtctttcttttcttgttttatcgtttttttttttttttttgaaaagtggaaaaatattctcagggtatattgaattgattgagcctcccttggatttctttgacttatttgacttactctatatcttgcttctttactcctctaatttaacattttcctctaaaccatcatcagaatgtttttgcactatcattattcatttttttcagttacagaatgtgggaaaaaggagagaagggggctgttgaagaggaggcttcatagaataatgaatctggaagaattcaaggagaaagcgtgtttgttgtggttcacgttaaaagagagagatcgttgcagaaactgtatgctgagcccttgtctgggtcgatcacagcaccagctttctctattcttggcctggttgttatgagaaagttgctcatctgggctggctgttcccgaccaaaatttatgctgatgacctcaactaggacctttctgaagtgcaataatatttttagccttttctaactgtccatgaatcatccatagctttccactgtccttagacactacccctaccatcgtcactgtctgcctcttctcaccttgcagcccgagttctactgaatccagaaaacccacttacaatcctgtaccacaatctgtcttccttttctttctcattaatattcttgagtctagttccatttttaaaaataaatgttttattttagaatattttagatttacagaaaagttacaaagatagtacaagacactcctatgtaccccacagctggttgccactattattatcttacattagtatggtacacttgtcacaattaatgatccaatattgatatgctattattaactagaatccatgctttatcatatttccttagtttttgcctgttttttcccttccgggatttaatattacatttagtggtcatgtgtccttaggctcccctgacttgtgacaatttctctgactctgtttttgatgaccatgacagttttgaggaatatcgatcaggtattttgtagaatggcctctgttgtgattttcctgatgtttttctaattataagcttcgggttgtgggtttgcgggaggaagatcacaaaagtaaagaaccattttcatcaaaagacatacggtgagcacgacttaccactactggtgttgacctggatgaactggctgaggtcgtacttgccaagtttctccaccataca

SEQ ID NO: 940 - DNA, 6595 bp, Homo Sapiens
gggcagcccccccctccgcgcgcccccgccccgcgcgcgcgccgcgcgccccactagcgctctgcgcgcgccgcaggctgtagccggccggggtcgcagcacgcctccccgctccgccccctcgcgcgccgcccggcgccccgcgcacgcgcgccgccccctgctccttcagcgagggtctgcggggagcgcgcgtccaacgcaggtaatgatgaaactcctgctctggtccgggctaccggtgaacagcgcccagcgggccgggcccccaacctcgctcctgagcctgaacatccccccaaccccaccgtgagaattcagcgaagagtaaaagctggaaaaagttgcgtgtcttaggctaagcagaacaaagtggggtgacggctccccggctaggaacagagatgcccttagggagccctctgatggaagagctctccgcttaagaaggtcaccactcccttacactcaggagatgttgctgagatgggtgcattaaagtttaggctttccagagtttatattgctaacaacttgaaaggaaaaaagctaactagagaactgactggtcttatttgttttagattctgggctttactaagacttcctactctcagaatctctggactataaacgctgggtggggtgggagctgggaatgttattctggaaaattaatcacaaatgaaaagaaaatcaactctaagactccagttagaagatttttgaaaatggcagaacatgactggccttcattcaagtcagaatatttaaagcaatccttgctaagaagaacttgattttgtataagcagtcccttaaatacagttgcttctcaagaaaaccacacacaattgatgtttgaatggctttatttacaaacatctcactccgtaagcctctgcaggtatttctagcctcccaggggccactgtcccgtttcacctgtaatttggatcacaattctgtttgttgtcacacacatcatatgaactgcttttcatgctgcttttatccacaaagctttacaagctttaatggcagctctatgtatgacaactttataaagatctgccaaaaggtatgatgccaagctttgcttttattaaactattagctattagcactgaaacgatgttcagtagagaagtactctcctttcaatatgtgagtggaaacacatttctctatggggactgctggtcagggactcactctaaagaaaagccacagtgttgtggttcagagcatgggctcaaaagacaaatggataagaagcccaagaccagtccttctgagctgtgtgaccttagacaagttgtctaatctctctgtgtctcagctctgcctcagtgttgttaatgggattgccgtgagagcaatgctgtaacatgtaaaaagcacttagaactgtgtctggcacacagaaagcactcgataaatattgacctggttagcagcagcagcagccatcgctggagcatctctacatcatacagggcccgatggaaagagaccagcactgagaatgaacagaacagtgctggctctgacccgctggctctggcattgctgaataactctaagcaagtctcttaagctttttaaatatgatttttcaccagtaactaatgaagggattgaaggagcaggtcccctgacgtcttttcaaattctaaaattctccagctttatttaatcctgcagtgaatccttttgcaaggtaaagagtactcgctcccctcaataacatcttatgagtttaggtttcggtgcatagggcaatacccagggcataaatcatttccactgtcaccatagcccgcaggtgaggtgagcaatccattagcttgcttctggaaacaagcctgtctgtatttgttcccccagcatctgcactcagcacactgactttgctcagtatatgtattggatggataagtgagtaaatgaatgaatgacataaagatcatagattgcctcagccttctattggaaaataacctaaagggagggggaaaattactacttaaaaccacaagtgccactcaagggatgcctcctatgaaaggaggagtgctaactgccaggtccccactggttcttcgtgctgcttatggcctggaaggcctctcctgcagccaagagccctgatgtgcttgggctgtgcaacggtgagtctggggtgagtctgggaactttaggcgcaggaatggagagcgctgactccctttgcctaagaaaggggacttagaggggaacttgaaagagggagtaagagagagggcaacaagaggggccgaggctaggcagtccatgcagcgggtgccaagcctgaggtggggtggtctggaaatcattccagaacaggaaatatgttcttctgtcttctgtgccattttaagttctgtacagcaatgcctgcttttccagtgatccttacaacttcccagcttgtatttgtgggtactttgatggaaagttgcaggggaagcagggaactagggctgggatcaataccaggaccaagataaaggaacagctgtaagagcaagagaacaagaactaagcaaaagcagggaatttggggcctgccatgatgatgggaacgtgggctctgaagatccacagacagccaaggcaggcctcggcctctccatgggactggaaagctcatcttgtctccctctcaaggagtaagaagatgacttctggatacgtgagtcacaaaaggccagaacttttctgcatctcccacggcacccccttacaagggcaggtcattttggggcatgccacctgggccagtggcagcaggtactgagcaaatccaccccccacctctcagagcttgtctcttcctgtcctggccaggtctgtttcttctctcttgatcaacagaaataactcccaaactgcttggtatagagcagttcatgaatagagattcaaacaggtcacactcaattatgaaatcagggtgcctgggccaggcctggcataaccctgatctcagaggaccacccctaccctccccagggagccaccagagaagctgtcacatgctcctaagacgtgcttgccaccagcacccccagacacttatgtgctgaaattgccaacatgcagattcggattcagaggtccaatcagggcctgagaatctgcactccttgcaagcccccaggtggtgccaacacagcagaaacattgacatcttaggccccaccacagacttaagccaaatctgcactggaacaagatgcccaggcaatctcccaccctgaagttgttcagactggcctcacttaggggagggagttccagattagagaaaggtcagatcagcggagcccagatggacagccaccagacaaaggaggagaggagggagaggcaggtcagagagatcagccggccttgattctgcagcacctggagccacagtgggaaattgaagctatcctcggggcaccagaaagccagtggaaggtttccaagaggagagtgacaaaatcagatggaccattttataggattcttctggctggggatgcagatccagttggaggcagggggggatagttgaattaagggaggcgctagagagagctagggtagcagtccaagagacccagatgagggtagctgcagtaagcagaccagcacatcactcatggtccagggtgatttgcaggcctctgaagcagccaagtacaaaacgaaggccctcccacttcccttctccctggaccagatctctctgacttctcacctggaaggtgcccacaggttgccaactccttgtcctgtttccaaaccctccctccttcaatccatctgacactctcctgcccctgctcaaaaaccttcaatagctccccattgcctgccaaatgatctgctaactcctccacccacactgttatgttctacttctatgtctgcctaacccgtgacacagtagttcacactttcattcatgcaacaaatatttattgagtatcatcaatgtggcaggcactaaaaagaaaccactcatctgccaaggcacataatcaatttcaggaggcttatagccacactgaaatgctcttccaaataagtgctttggctgtagcaaatgaaaataataatagaaaacacttattaaatactaactttgtgccaactatcatgttaaacactttgtgggactatcttaataatcttcctcagacacctataatggagagggttggcctcatttttcgttttgtgggtttttgttttgtttgtttgagacagggtctcactctgtcaccaaggctggattgcagtgctgtgatctcagctcaccgttgcctcaacctcctgggtttaagcagtcttcccacttcagcctcccaagtagctgagaccacagggatatgtcaccatgcctggctttttttttttgtcttttggggggtgctaccatgttgcccaggctgatcttgaactcgcgagctcaagcaatccacccgcctcagcctcccaaagtgctgagattgcaggcgtgagccactgtgcccagctggttgggctcattttagccaaaagaaaaatctcaagtcacttgcaacgtaagtgcaacaactaaattcatagggtatgaattcaggcagtctcaacccaggacttctccctcaacccctgtcctctgaatgtccttgtactctaagtcatggggctgtgagtgaaacaacatcaaataaggcatgttaaagtgcacaataaaaccccattcaaattctctttccgactcacctcatgctaatcccaagtcctcccatgatgcccgggtcacaccgaccaagcaattccaaccttgagggttttgtcttccttttccatttgcctggaacactctccttcaaggccttgttttggcctctcaccattcagatctctgctcagatatcacccctggcatctctgggagagaagccactgagacacttgtaggcaataatggaaatctgccaaaaattctcttggtgggctcctatcacgttctaagcccttttctcctgtttccttttttctgtcttcctctccacttcctcccacctccccttgcccctttagcccttcaagaacaagtgcctctctcttctcctccgtgttctcctccttaatcaaaagctgctctcatcaaaagatgtcctgtccatcatatacgccttagtgtgaatttgttggtaggtcaattttcccagaaatgtctgatttatttttattttttattttttttttaatttttttgagaccaggtaagtcttgctctgtcacctaggctggagtgcagtggtgcgatctcggcaatctcagcaccctgcaacctcaacctccacctcccaggttcaagcgcttctcctgcctcggcctcccgagtagctgggattataggcatgtgccaccatgcccagctaatttttgtatttttaatagagatagagtttcaccatgttggccaggctggtctcgaactcctggcctcaaatgatctccctgccttggcctctcaaactgctgggattacaggtgtgaaccaccacacccggccaggagtgtctgaattttaaaccatatgcttgattataaaatagtagagtttgcctttcttaaaggaatttcatacaactgggttgctagtttgtgtgtgtgtgtgtgtgtgtgtgtgtgtgtgtgtgtgtgtgtgtgtgtgtgatatgttaggggcagcaggtttttccttaacgccaggaatcattcaggctgactttgttcagctggaataatttcaggcatcgtgatacagttgaaaggaaagaggatgaacattaaaataaggaaggcctcaatttgaatctcgcttctgacagtactcgaacgatcttagactaagtgatttcactctgactcccagttgtctcttttataatgtgagggtaattaactattgtaaagattattgtaagagctagatgagatcacaggacacaccataagggctcagtggggctggaatgcgtgaagtcctctttggagcagtcaggcctgatggaccccgtgcctgggctcgaagacacctacacacactcccagggcccccactgcttataactgtttctggaaagaactgagcatgaaacttggcaggagaccacaaaacgtcctggaatcctggccactgtcaagtctagaatgctctcctccagagaatcacattcttggggccagtgttggagcatggaagacttagttggggattggaactgctccagccctgaagccctccttcctgtccctgtaaccagcaaatgtcactgtctgtcttgccaggctaacaacctttctcataagcatcaccaaacctgaccagacatcagtcctctgaaaagaatcataatccagccaccataaacccaaaagccaaagtggtaattatctaaagatgaggaaaggtttcctcccaggccctccaggggccaaggaagttctcacattaaacagttacactgatctccattgatttcttcagtccatcaaccaattattggcaactttttcttggaaacctactgtatgtgag

SEQ ID NO: 941 - DNA, 1279 bp, Homo Sapiens
tcaagatattgtgtccttgtcattggccagagatagataggagaaagcacatttggttcttaagagtagggaattgtgtggaagttattggttttaaggtaccattacagataatctttaaaacttgggtgggatctcataaggtgatgatgtagacaaggaagatagaagaagcagagggataccatatagggaggtgtttgggatgaaggagtccatgcaaagaagtgagaaacaaggctggaactatatagtagagatctcagttccagactaaggaataatagaactgatggcatttatggaacacttactatgcaccaagtactttctttggagtatcttaatgagtccttacaaactcccctatgagacagtcttttgtgaatgagaatcagagacacaggagttaagtaattaatacagagtttgtaagcatagcaggcattgaaacccagtctgtcaactccagaacctatgaacattttatccactgtgctgccttatggtcatcaactttactacctaaagttgctgattcctcagacctagagttttgcagcctcctacatgatggttttatttttcaaatagcacaaaaatagccctttgtgagatttatgtaggtaagagggaacctctgcccttttgagacacttagccttctccaacccaagttagggtatctttgggcctaatatttctgctctcggaaagccctagaggtcctaggcagcaatagtctctttaaatgtttatttattgcaagggacaatcagggtcagctaatccaggacctgtggcgaggcatgcagagcactgtggccaggctctgctcatggtacacacaccccagggccatgggcttttcaccccaaccccaccaaacttgctaaaagtgttagatctagtctagaagcctgaggtaactcctagatgtaaaattcaggatataggcccaagaattcctgcatcccagcaagaaggaagccagactgtctgcttttacgaactgaattgagaattcacctttccagtgagactgaagctttgctgaagatttatcgccccctggaggacaatagtataatatatctcttcaggtactctagaaaagatgcccaactgaactgaaatacacatttttttcctaaagaataggaaaatcaagcctttgctaagacaaccctttaaaaagatgtccaggcatccaaatggcaggagttctctggatctgacctcaaaagctaggcctgaaatgaatacattgtgggtctct

SEQ ID NO: 942 - DNA, 1939 bp, Homo Sapiens
agactccgcccagccaggagtcccctgaaggctgctggaaaaagagcaacctggcacccggaataatgactctgcctggatgcttagagcagtgcgagggactcccaagaagcccctagcccacttgggggaccagggaggattaggagttggtggttgagtaccgaaagagttagctaggcgaaaaggggcgggaagggcctcctaggccgaaattgcatggaggaagatccttaggtagaggaaaatgagaccaggcttgtaggcagaagcagatttgcagtgaaacaaatgaagcttaagtttcgggacctggccgggcgtggtggctcacgcctgtaatcccagcactttgggaggccgaggcgagcagatcacgaggtcaggagatcgagaccctcctggctaacacggtgaaaccccgtctctaccaaaaatacaaaaaattagccgggcgaggttgctggcgcctgcagtcccagctactcgggaagctgagggatggcgtgaacccgggaggcggagcttgcagtgagcccagatcgcgccactgcactccagcctgggcgacaaagcgagactccgtctcaaaaaaaaaaaaaaaaaaaaaaaaagtggaggcgtgaataacccaccccttgtttagcgtaccatcaagaaataaccataaaaatgggcaagcagcccttggagctgctctatctatggactatccattcttttattcttgtactttaataaacttgctctcactttgcattgcggactcgccctgaattctttcttgtgcgagatccatgaacctctcttggggtccggatcgggacccctttctggtaacaatgcctgtaatcccagccaatctccctgccttttgatctccctgcctcactcctacccaccctgataattggctgttgaatgatcatttaaaaacacagtttctgatcatgtccctcctctccactggatccctactggtgatgtcaaatgttgtggggcctaacgcttccgcaatttgagaagacatagttaagaaaaataatacaaaacttggccgggcgcggtggctcacgctgcccccagccgaaagctttttcttatttggcatttgaatgtggaattttggaattttcttattggcaacaaatactgtcagttattttccttgaagtgacaggctcactttgttcatttttcaagaaaaaggctggccggcactgtggctcattcctgtaatcctagcacttgggaggccgaggtgggtggatcacctgaggtcaggagttggagaccagccaggccaacgtggtgaaacccagtctctactaaaaatacaaaaattagttgggcatggtggctcatgcctgtaatcccagctacttgggaggccgaggcaggagaataacttgaaaccaggaggcagaggttgcagtgagctgagatcatgccactgcactccaggctgggcaacagagtgagactctgtctcaaaagaaaaattctagtatattaaaatataattgattttttctgttgaccttgtatcctgagaccttcctaaactcaattattacttttggtaactttttggaaatctgttcaggttttctatgcatatggtcatgtcttttgtaaataaagacactttaacttctttcttttctatctatatcccttttttttttctttgctttattccactggctaggacttccagtacacagttgaatgtaagtggtgatggtaggcatccttgccttgttcccattcttaagaagaaagcatttagtacttcaccattatatatgatgttagctgtagttttgtgtgtgcgtgtacctgcatgtgtatagatgtcctttcttaggtttagaaagttcccttctgttcctagtttgctgagattttaaaaaatcatgatagttgttgattttcc

SEQ ID NO: 943 - DNA, 1395 bp, Homo Sapiens
ctaacgaggaacactaaatattgtttcctgtgtgcataagtcacttgcagatctagaagaaggagtttgcccaattttaaattagaggcaaagtacttttcttagatctgcaatttacatctctaatttaaattgcccaattttaaatagaggatttttttgttgatttgagtgaattctctgtaaaatgaagatttttaaatctgctatatatacacacatgcacatacatgtgtagtaaatattttacaagtatgctgccttttattttttctcaaatgcagggtaatttttgttttgctaaattaaccttcacaatgcttatttctgagagtcttagaaaggttttgtcaacataaaaatgtatctgtgtaaataggcatttatattttcttctgattttttttcattttgtatattaaaaatttttaatctatattccatcaggaacttatttcttttatgtactgtaactttggcatttttttctagagatcatcaaacccaagagagtctagattttctcctgttattttccagaagttttatagttttgtatttgacatttaggtccgtgattcattttgacttaatttttgtgagaaggtaagatctgattcattttttttacatgtgggtattcagttgttccagcaccactttctgaagaaaccaacctttgtttcatcatgttgcctttactttttcatcaaagattaattaaatatatcgatgtgtcgctatttctaaactctctgtcttgtttcattaacctgtctattctttcatcaatatgatactgccttgattaccgtagccttacagtaagtcttgaagttgagtagtgcctgtctgtcctccagctttgttctccttcaatattgtgttagctattcaaggtctttttcttccccatataagctttagaattactttttctatatccataaaataatttgcttccattttgattagaagtgcattgaatctgtacattggtaagaaatgacatcctgatgatactgagttattctattcatgaatatgatgtatcttctccatctcttcagttctttttttatttccatcatcacatatggacagtttatgaaattacataactccctctaccttgaccaaaggacagtgatgaattcctcgttctgcagccaacaagtcacctctgagggccatgtgtctaaacatagacaggagggacacctgttgcttcagccaacacctgctggcatgtgctgaggatgctggtgctgctggctttcccagccctgcccccggggctgctttgggtgtgtgcctcttgactttagtgagaatgtactttttcatccctaccatgggtgaaaagttttcacaaataaaaactttttaaaataa

SEQ ID NO: 944 - DNA, 1964 bp, Homo Sapiens
tgtgtccagaagaaacaccctcaggaacagcacccaaaatcacactgaaaagtggtttagtgggaagcactggtaggcacagacagctctgacttcagcaccattgtcaccaacgtgaccaatgctggatacacgactacagcctcttatgctgttggctctggaaacaggatgtaactgctgccattatccccagaatagattctggagggagctcatgatttgaagtctaatatgggtacatctgtttggctgcatctctgcatcaagagaggctgggaatgagtatctgatttctgtagtcagaggctattgccacatcccaccaagagctatagagcagggagcgcccccaaatggaggaaaagtgtttactgggcaaaaagaatcaccaaagtctacaaagcctttgactacccaacatcagcaagtacacacacacacacacacacacacacacacacttaaataaacaaaacaaagtaacagaaaataatatttataaaccccttttagcccacatacacacaaaaatactcttttcaaaaggggatcaggacacatcagttactgcatccagctccaagtcagcttccaattccatcccagggcagatcacctatgtcttcattccagcttcttggtggctgggaaagtgagtttaccgatcaagtgctgggtggctgtgatgttttacaaatgtccaccagagtccatgtcagtttctctcctcctctccttctctctccctgtcattccttctctcctgtctctcattctttctctctctttctctctgtcattccttctctccgtctctctgtctctcattccttctctctctcattccttttctcctctttctcgttccttctctctctttctgtcattccttctctccttctctctcatttcttctctccttctctctctcattcattctctttctctcattccttctctccttctcactctcattccttatctacttctctctccctcaatctttctgtcattctctctctcattccttctctacttctctctccctcaatctttctgtccttctctctctcattccttctctctttctctctctcattccttctctctttctctctgtcattccttctctccttctctctctctcattccttctctttctctcattccttctctcccattccttctctccttctctttctctcattccttctctctctcactccttctctcctgtctctctcattccttctgtccttctctctctctctcatcctgtctctctctctcattctttctctccttctctctctcatcacttctctctctctctcattccttctctctctctcgctctctctcatcccttctccaatctgcatataaggggacccatacagttcaaacccatgttgttcaaggctcaactgtaattgtacatgtagaaaatctaaaataatctacggataagccattagattataataaatttagtgggctccctggatacaaggtcagtatacagaaatgcattgtatttcttcatactaagagacaaacaataataaaatgaaataaataatttatgatattagaacacatcaaatacctaagaatatatccaggaaataattttcatgacactgaaactacaaagcattgttaaaataagtgaaagacctaaataattggagagatactatgaattgaatcccaaactgttgggattacaggcatgagccactgtgcccagccaaagaaagtgaatcttgattccctcctcacatcacacataaaaatcaattgctgattatgacagatttaaagcttaaaataaaacaataaaacttacagaaaaaatcagaggaggatatgttcacgatctagggatatgcaaatattctacacaacattaaaagaactgatagatagaagaaaacatttataacttggacttcact

SEQ ID NO: 945 - DNA, 811 bp, Homo Sapiens
actgaggtgctgaagaggctctcactctgtctaagagagtgtcccgagcaagacaagcagtcctagatgcccagattcttgttttggcttcggatctgggcaaagggaaagcaaagcagctgtgctcagatctgaacttgttggacatgttgtgttgaaactttactgacatgtatgggtgtaaatctgccagaagctgaagaactcatccgtgatgaagatagctctgatttgaattcatagtctatgactcctggaaaatatcaggcaaaagagcagaaaacacctttaatcaagcccatacactccactctctgttggattcaacacaaggagagttccttgtgccaaagtcccaaatcattagtccaagaaaacttcctatgatacaaaaggagacgataatgcctgcccagttaaaaagaagggaagaatctcatcaagaaacaacaaagaaagaagtagaaagaatcttgggattgttgcagttgtatattcgagatgctacccagcgtccttctttgcctttgtggttgatccacaatctttcccccaaacagtggaaaacatctttcatgtttccttcattatacaggatggttttgcaagagtaaaacctgaccaagaccgactgcaaataatagagcctgttaatattaatgaagaaagtgaggaaattcaccaaaacacccaagttaggaatcgaggaattctagctgtgaggtaccctgactgggaggagattgtgaatacctttgagatttcaaagcctgggattactccaagtcagagacagcagaggctaagtgct

SEQ ID NO: 946 - DNA, 2095 bp, Homo Sapiens
gagacggagtctcgctctttcgcccaggcaggagtgcagtggcgctatcttggctcactgcaagctccacctcccgggttcacaccattctcctgcctcagcctcccgagtagctgggactacaggtgcccaccaccgtgcccggctaattttttgtatttttagtagagacgggagaattgcttgaacctgagaggtggaggctgcagtgagccgagattgcaccactgcattccagcctgggcgacagagcgagactctgtctcaaataaaagtggagttacttttgtgcagagtttccactcccctggtaagaacaaaatacttgtgtgtatgagacacaaatatcaattctgtaatttctaatttcacataagaggtaaaggctcttatgtttgtatttaaaatgatcattacaccaggcctggtggctcacacctgtaatcccagcaccttgggaggctgaggcaggttggatcacttgaggtcaggagttcgagaccatcctggccaacatggtgaaaccctgtctctactaaaaatacaaaaattagctgggcttggtggcgcacgcctgtaatcccagctactcaggaggctgaggcaggagaagctcttgaaactgggaggcggaagttgcagtgagctgaaatcacacccctgcactccagcccgggcaacaagagcgaaactctgtctcaaaaaaataaaatgatcattacacaatatgaaaatgaataataaaattcatgctaacaattttactttacttagaatggcattaagtagcaaaatttaaaaccacgaccagttgagaaattgttaaaggatggaaaaagctttatagttagtacctttaacctaatttttccttttaatttttttttctttttttgagacagggtcttgctctgtcaccctggctggattgcagtggtgtgatcacagctcactgcagcctcagcctcctgggctcaagtgatactcccaccttagcctccctagtagctgggactacaggtgcacactactccacccagctaattttcaaatattttgtagagacagcgtcttgctatgttgcttagggtggtctcaaactcctgggctcaagcagtcctcctgccttggcctcccaaagtgctgcgattacaggcatgaaccaccgcacccggcccaaggagtttgccttttcattttgcactgggccctggatattacatagctgaccttgtcttcaggactaggaaaaggaccgatagaatcctgtgttccttttgaattaatctacatttctttgacaacaagctggacataggcttcatgaagtacagggggctccaggaatactttgttctgaaatccaagaatcctcactgtatcctttacccaagctctggcatatgtcatcatgactttggttcccttggggcaaagagcatacttttggcctgaatggacattgagtgtgggggtgcttaacacctctgaacaggtcttgtccacttttgagttggagggcaggtcagctaggtgtgcacttccaaaagagccctcactgtccaaggtgcagttgtaatccaggaaggaaatgaggtccatgatgtgccactatgtggagaactcacaggttatcacaacactgaaactcttgatgaatgattactggaggagggagtttacatcgtgtcaggccctacactatggagtgtagggatgccacccttggttcccattgtccaaaaacaaaacccaggaacttccacatcttactgtccttcacattggtgtggaaggctttgaagaatctgctgtcctgatgagcgccttgtctcaccacaaaaggctacaacagggatatggcatcaattggatcctcatccagcttgaaataaaccgtggaagctgcttttcctcaggacccgatagagggtgaagttctgggcttggtagagactgaagcagactggcacatcagtggtcacgactgcagtcaaagtgggagacacgatggtaaggaagatgccagaaccacctgctatttctcctagctctatcatacatgcccacatggcactcaagtatcctggtagca

SEQ ID NO: 947 - DNA, 1261 bp, Homo Sapiens
tgcaaacgcagtctcctttgcctggaatgctcttcccatgtgtgtcctttccagctcaagtgtcatctgaaggcaggcttccgataaaatacttaactgacaaattaataatctaaagtgaaaagaaatagataaatatttataaaaattaggctctcagatcaaacaggtcaaaatcttgagctcagagcaataacgtaaggtatctgtccagcataaaaattttactttttggctacactgaggccaaaaggaaaaagctgagaaaaagagaaaaataaactgctcaaattcttccctgcccacatttgttaatgaagtaaaccagatcagcaaatagatttgttacttgttcaaggctacctggagatttcatttttcttatacaattcagccaatcctagataaaatgtaaatattgaaattttaaccttgaactcacttgaagctaaaaaaaaataagatgaaggaagtttttcaaaatcaaactgacatggaaactgctttacccaaaattttgatcttcagccttcattcaattacctatcagggcaaataaagtttagcaatgtgaacaaatctcaattttgttagaaatataatttggatctcactttcttttatacaccagtgagttggccgggcatggtggctcgcgcctgtaatcccaggactttgggaggctgagctggctggatcacctgaggtcaggagtttgagaccagcctgccaacatggtgaaaccccagctctactaaaaatacaaaacttagctgggcatggtgatgtgcatctgtaatcccagctactccagaggctgaggcaagagaatcacttgaacccgggagacggaggttgcagtaagctgagattgtgccactgcactccagcctaggcaacagagcgagactccatctcaaaaacaaaaacaaaaacaaaaacaaacaaaaaaaacaatgagttgttatactatctcatgactctaatactaaaatgaaagctatatgatttttatttgagtgtgtatatgtgtttagatgtgttacggatatgtacatttatcatgttgtatgctgtgtttacatagtaaaatctgatgtcgttggtcagaaatcctctaaggataaatgagtactcatataaaatataatatgtatatagccattagcccagataccttttagttcacatgactaaagtaaacctttagtaaataaactggtttttaaattactgataacataaaaataaaaatgtcttc

SEQ ID NO: 948 - DNA, 3902 bp, Homo Sapiens
gggagatcttgcctggaggtggtggaaatgcgagtggagagggttcaaggcttcctgcagagaaaggtgtgcaaatcctggcggcgggagaggggctgttaacagacctcagtttttacttcattctttaatctctcctctactcgtataagtgatatacctgtgctttgtttgaactttacggcagccctataagggaggcattgtaagagacctctttttttgtctatttgctcagtgctctctgctgtcagtgggctgtgctcagccctctgccagcattaaatttcctccttaaaacaaccctgagtgtaataggctgaataacggcccccaataatatcagaccctaatccctgcaacctctaaatgtaactttatatggaaacagcgtctttgcaggttaagttaaggattttgagatgaagattatcctggattcgaaagacgaacactaaatggaatcacagtatcctcatcaaatcataaaagggaggttgagagagacgatttagccacggtggcagagattggagtatggcagccacaacccaaggatgccagcagccaccagaaacaaagagacaagcacacactgggggtgagggggtggaggagcggggagcatcaagaatagctaatagatgctgggcttaatacttaggtgatgggatgatctgggcagcaaaccaccatggcatacatttacctatgtaacaaaccttcacatcctgcacatgtatccctgaaataaacagagacaaggacagattcacgcccagcccatggggcagccctataatgcatgctgatttgggcccagtgaaactgattttgggtttctggcctccagaactgtgagagcataaatttatggtttaagtcagcaagttcgtggtaatttgtttcagcagccaagggaaactaatacatcaagataggtaccattatccctgttttacaggtaatgaaactaaggcacaaactggcagttccagggggagccttgccctaatcctttctactgtacagtgagtgagggcttcttccaaagtccttcacatgaggggagaaaagctgagccagatgtaagccaccctaactattaatcaagcagtttttcactatacagtattagctcccctccatgggaaggcagtcccttcccagtgaccaacataacagattggcaacaccccataaatggcaaacatccccaatgcaaaatacagctttccacctaaaattggtgctttctgctcaattaataagcaaaggactagtgccaggcatgatggctcacacttgtaataccaacactttgggaggctgaagtgggcagatcacttgaggtcaagagttggaaaccagcctggccaacatgataaaaccccatctctactaaaattacaaaaattagctgggtgtggtggtgggcacttgtaatcccagctactggggaggctgaggactgagaatcactttaacccaggaggcagaggttgcagtgagccaagatcacgccactgcactccagcctgggtgacagagcaagactctgtcttaaaagcaataacaacaacaacaacaaaatagtaataataaataaccaaaggacttcctgctgacctgctctgctttgggcactccaaagtgttctgtggcctctgaacctcagtttcctcatccataaaatagggataataatatacaccttaaagaattattgtgtcccatatctgtaattccagcactttgggaggccgaggtgggaggattacttgagcccaggatttcaaaaccagcgtgggcaacagagttggaccccatctctaaacaaaaagaaaaattagccaggcatggcggcaacacacctatgatcccatctacgcggatcacttgagcccgggaggttgaggctgtggtgagctgtgatcgcgccacagcactccagcctgggtgacaaagtgagaccttgtcttaaaaactaaaaaagaattattgtaagaatttgaaataatactcataaataactagtatagttcttatcatgtcagaggtcctggaaatggggcaactgtcattttttttaatcctcctagttagttttctgctagtctcagaccaccaaggggcattttgttcccatctctcacatcccccaactgacctatcctactttttatcattgcacatgttacaggtactctgtcccttctctgtgagaagctaaactgttagaagattctaatggaaaagaggaaactaggccactagggctcatcacaaatggcattagctaactgaaaggaaaggtacatggaaaatgatgagatcgtatatcacaaaatgtaggtacatgcttctttcatctaactttggggccagactgaaagcaggaatgaggtggcagcatttcctaggaaggaaagacgagctggacaaaaggcatggaaaaactctcagctcagcagaaattaaggagatgcaaataaaaattataaggacatacatgtttatacctaggagactgctagaagtcttaaagtctgaaaaaaatcagatcttggcaagaatttgggagtataaattgatataacctctttggaaaatatggccttacctagaaaaatggggcatgtccatatcctactacccagcaattgcactgctaggaatattcccccagagaaactcttacccatgtgcaccagaagactcaaataagaattttcatggttacattgttcattataacagaaatctaggaacaacccaatgtttgtcagtactagaatgggtagacagttatgataaatgtatacagtgaaacaccatacagttatgtaaacaaatgaactacacctgcatgtatcaacttggataaatcttacgttgtaattttgagggaaaaatgtaaatcacagaagaatatgtatccttgatgccattaatataaacactaaaaaccaggctaacctaaagagtatattgttaggcatacataaatagaatggtaagcctgtagtaaaagcagaggatgacaaacacaaaatatgagaccagtgagttctgagtgagttggcagggctgcagcctggagtgttggaatacctgtattactcagagtcctccagataaataaataggaaacaagtagacagatatttattataaagtattgtctcacatcattatggaaactgagaagtcccacaatctaccatctgcaagctggagacccatgaaaatgagtgaagtagtttgaagccctgagagctgaagaggtggtggtacagatgctgtctcaaggcctgaaagcagggagaactgagagcagggaaagatctatggcccagctcaagtattcagacagagagtgaatgcagccttcctccccctttttattctcttcaggcccaccatggattggataatacctacccacattggggagggccatttgctttactcagtctatccattcaaatgctaatcttggctgggtgtggtggctcacgcctgtaatcctagcactttgggagactgaggcaggcagatcacttgaggtcagaagtttgagaccaacctggctaacatagcaaaaccccgtctctactaaaaatacaaaaattagctgggcatggtggtgcacgcctgtagtcccagcttgggaggctgaggtagaggaattgcttgaacccaggaggcggaggttgcagtgagccaaggttgcaccactgcactccagcctgggcaacagagcaagactccatctcaaaaaaataaaaacaaatgctaatctcttccaggaatgccctcacacacccagacataatgtttaaccagctacctgggtacccattagcccagtcaagttggtacataaaattaaccaacac

SEQ ID NO: 949 - DNA, 2513 bp, Homo Sapiens
acaccggcgtgctcgcaagaggcgggaaagcgttagggagagacgcgggtcgcagggtccctccctctgcctgccctatctacccgcctgcccagcgagcctgtccatcttcagcgcccaggccctaggggaggggacgagaaaggccccgcgcttctgactcatcatctccaacccctttctcgcgcgcgctccaagtctcaggacttcggacctgggccctcctgcgagggggtgcggcgacagcatctgggaagccccagctctgccaagcgtcagctccgagccctcgccagtctctgaagctgccagcgcagggctggggacccagatccagctctctattgcagtggctgggggagcggcacgccagtgcaggaccgcccgcccggctcctccccgaacgcggggccagtggtcgcgtccgagaaagcgccaggctaggccccgacttccccgcctcgcgtcactcagcacatccaacagcgcccctaccgcggagagaaggctctttatttcctagccggtcacgggctagcggggcatcctgggacttgtagtctccgctacagtagaaaggagatggatcgaaaggggaactggggcactcctgaattggattcagggagttggcgtgtgcagggtccgggatttggagtggatgggattatgaaaggtggacagaaaagaaaagtgcgatgaggcaaatgtgaagctgtatggggaggtgacaggaagagaggatatggatgcaagggagaaagcagcttttcagggtggtgaggtgaggatatattctcgtccaggtgtatcttcccctaacagggaaggaacgaaaaaagggcctgctttgagtgaaaactgaaggcactcccggacttcctattggactcgaaggatcccagcaagcttctgagtttggtggggtgggatgcaggaatgtctggagagcattctctcagggtggaaggagagcagcacgtgtctgttcccgctgtcccaccctctcatttgctcctgtgctggccaccgtgggaccattctccaaaccaggaacctcttccaactcagagaagccctgaaaaccagagacaggtgtgagcaaattgtagaggtgagaaaggagaaaccccagacagaaacaactgcttcctcctgcccaattttctatcctgtttcccatagtcctgccaatatttaggcagcttcctaatgctttcccactcttttaacctcaatcatttggattcccagtttcctcttacccaccattaggggagaaatgttcaaagccagagaaagccaatcagtttcattctaggacctcttcttttctctcctgccccattattttcccttaagtgccactgaccaggataggcagtggaaaaattagttggcagctagctattcgtgctttcttccctgcccccatacctcctgcagctcttgatagtgcagactctggctcctgcagcatcctggtttcctctggctcagcaagaatagggcgtgcactgagaccagcactccccctagggtgaaggcctcagcactgagttccagcaccagcaagccagcatgctgcaggtagacagggctgagaatgcagggaccccgcacctgtttgcccctgcccttttcccttcccacctcctcttgcctccttatcctcccaccttctccttcattgaccagtacctgggaggaggcagttggggcaggccccaaggctgtcttcatcacctcgaccaccaccactatgaaacccaagatcaagttgaaggtgttgaatatcatcatggcccgcacctgccagtgagccagctcagccctgcccagcctaggggagtcattccaacctcaatccccacttgcagcctagctgaagacaaaactcagcttctgcttctcagcctccaaacagggccataagccctcttaacttttttgctttcctcctcagtgattgaggccagtcagtggtgacagctgagagaatgagtcaacacttagccacttacttcctaggctgagggttgtaggtgtctgttttagggagtgggaggacagtgctgcgttttcttccctctcaccttccaaaggcggggtgctctgcgaagctccagagtgacagtcccagtgaggagaccctgaatggtgagaagggcaagtgttgagctctggtcccgttaggaaggggccctgggaccttccaccctcccttgtggtgggtcttactgaggctccaggcccaagaggcagcgctgtggccatgtgacaatcagagttcaggcaggcgactgagacagcaaggggcaccacaaccactgccagccatagctggctcacctgggggtaagggtagggtaattggggaggaactgtcagggattccctcccttctcgtaactcctacctctttagagatcaggaaatgggattgaatgcagggtggaggaaagcagtcaacccagagcaaggacgtgatcattaaaaattaagtatcattt

SEQ ID NO: 950 - DNA, 2451 bp, Homo Sapiens
aagctttcagaaattggattgcatttcttgcttattatacatcccttgactattttgtaattgtgtgtatttgtggaggtcacatgtaaataaacttaaagtgactctactttgtgaaaatgtgaaacttcgtgtaggtactcagtaaatcagtaaattcttactaacgttagcccccagcctagctatggagggtgcatgctgagcccgaagcagagagctctgtaatctctgcattcatcaccaccatgaggaggcctcagaagcttctagcactgtttgcaccttccccacatcacccctccctgccttcctcacagtcttccttctgatcagaagaccctttccttctttctctgcctgtcaaaatgctgctcactcttcaaaccctagctcatatgaaagtgtctggtgtgagcccacttttattgagttgattctgtatctttgatacaactgtatgagggttctccagagacacaacaaatagaagggagacgtaagaaattggtttaaaggttcaattgctaatctcatccaaaaacacccttacagacacgcccagaaataatgcttaaccatgtatctgagcacctcatgatgccgtcaagttgacaaacaaaattaaccatcgcagcagccatacatttaaatatatttgtaccagagaacttacctgattctacctgcacttcagatgcttaagacatgtctgttttctccactttccccaaccagattgtatatctccatgaataacctaaatgatcccccaaattggaatatccggcctaattccagggcggatggtggtgatggaagcaggtggaattatgccctgttggttccaatgctgggattggctgcttttcgtaagtcatggttttcttaaaattagtgttttccaggctgagagtgtggagccccggtgagggaggcagcatggtgtgggagcctgaaggccgtgactttgggacctgccagggacagccgagttttatcccctgcagtgaaccgtgggcaaatcacttaagctctgagcctcagtcttcctgttcacaggagatggataatcatacttaacctcagcacactgcaaggattaagtcagccaaggcgtttagaagcattttgtgtggggtgggttttaataacttagttccctctgaaggctttgctgctctcaagtcggggaggaggttccttatttcaggtgccctcataaggactgctggggaacaaaacgggtgtaaaggaaaccagtgggctgggcgtggtggctcatacctgtaaccccagcactctgcgagacccaggtgggcagatcgagtgaccagcctgagcaacacagcaaaaccccgtctctacaaaaaatacaaaaattagcgagtcgtggcggtgcacacctgtagtcccagctactcaggaggctgaggtgggaagatcagtggagcctgggaggtcgaggctgcagtgagtggagatggcaccacttgccctccagcctgagaaacagggttaaaaaaaaaaaaagaaaaccagttttggaaaaccagtgatgtttaatgtttaggaaatcagtctttgggagacttcatccatgaaatctctgcttggcctggccagaaattctctctagtttagattgacttggcaccactttggggaactgtcagtcacatgcagacttacatccccaccacacaatcaattcactgatgcagaggagtgagttttgtgtttcttcacattccatggttctgggctggcacttaggaacatgagaaactgaataattgaatggaagaaaggcaagactgccctctagttgtagcgatacattttgtgtagcggctttttatctgcttcgatgtctcaggtcagaagttttgctgtagaggaagaggaggctggtaagagcaggtggtttttatgattcagtgatctgcgcagtgcttgcttcttggtgaaagacagggcaggtccacatccaatcctaaggggctgccatgtaaaaagctcatccgcctgcaggcttgggaaaaaaacccttaacacttggagaggctactgttgcctgtggctagggtgagtggattggaaggcttaaaattactctgactaatgtaataattaattggctttgaggctgggagaggccctgaagtgactcattttccatttgtttttcagactcatctcaagcttttatagcctttcatgataactttcacttctgaaattcttaccttcccttcttggacttttgaaatgatgctttctgtccctgaaaagggttgaagaatattttttcttcctggttttttgctgaggtagtgtggtcagagataactgttaacttggtgttcttgtaaggattctccaaaggtgtgttacgatgtgtttgaggttctattgcacataagagcgtaaccagccttcagtgtagtc

SEQ ID NO: 951 - DNA, 1564 bp, Homo Sapiens
gtggactcaaaggttttctccctgagaggcagagcccaggccagctgattcatcagtatcaggatggacatggtagaggatgcggatactttgcaggagtgaggggacatcattatgaagcatgagaaggtagagggcagtctgctccctggagggaggcctcctccagtgcaccctggtgaaagggtcctgggctccctaggagcacagagcggggacaggtggccctttcaccctttaccttggacccctcaccaaggctcccactgggttgcagggacaccaagctgggctgccagcagacatggggcctgtgcctgttggaatctacagcagtgctgattgctttgggattctgcatgagacggagctgccccctgtcactacctggaaggtgaagcaaatgtggcaggagatgagatgaaagagcaagtggatggaaatgctgggagaatgggagacatatcagaacagcaaaaaagtcatgaaggagaagggcaagaggtcctctggacacatccaccagatcgacctggacatgagccggacattaaggaaccacctgttcttcagggaccgatatggagtcaagtaagcctatgggagccacagggtcccagtggagatggggtgaaccagagggatggggacttccctggagcagaagccaggatcacccaggagggatgacagagctgccaagagctctcctgtaccagggagcagctggtaccatggaccgagcacctcccaagttccaagccctgggccagactggaacacgtggggccagaacccaggaggatcctgaggagacagacggcggcaaagaaaatcatgcacaatggtgaaaagtgctctccctgacccacagggacccatggtaggacccacgggagggcagcaggatggagggcccatgagcttccccaggcaacactgacaggaccaaaagcagggggagcttggggtcctggaaactctcatccaggtctgctgggaacatcacacggcacagccactttggcagccagttgtgcagtggctcacaaagttcaatggacttgaaccacatgtccccaaagtgtcaccgatattgaacccactgatttgaaaactgatgtccacatgaaacctgcatgccacattcactgcttgattcattgacactcacacatggaggctacgggaatgaccttcaacacgggaacgcagagaggaagggtggtcctcccttcaaatggcagaagattcagagagaaaagggaacgatctagtgatgcccacatgaacatgggtggatcctagatgcgttttgctaagggaaagaagccaggcccaataagctaccacagtaggattcccattcctagaccattctggaaaaggccaaaccatagggaccgagaactggtctgggtggccagatgctgacggatcagggagaggctggctgcataggggccaccctggagacttggaggatgaaggagtcactccaggaggggctggagcagtggccaggagattctgcacatcggtttagaaccctccttgccctgca

SEQ ID NO: 952 - DNA, 16406 bp, Homo Sapiens
attcagaagctgctatttctactgttggttaatgtatttttgtttctaccaaggaagctgtgaaatccgcgtgcacacccatcccaaatctatccgtggggcgggcgcaggctgagtcattcctaggagtaactttataccgatcctcgcactctggggtcgggacaaagacatcatctctccgttcctcccattcggtgagcttcgttcggcctcggccaaactccactctcccgtttctcgagtccaacacagaattaagggctgatccctggcagcgatgagcacaagtcaagatgcgtcttgggaggttcggacgtccctcgccctcggccactccggcaactaggccgggtactaagcggcagcgcagagggagggatcccaaggctccggccgaggaagccgcaggcagccccgcagcacgagtccgacccacacctccggcagcctagtggagcatcgactcgaaccgcttttgtctccacaggggctgtcgcgccgggaaagcggccagtgggcaacacctgccggggcgggaggcgccggggccctcccgtgcacacacctgcgcgtgggccgggctcaggccgaccggaaccctggaccatgcgaccccggcccaccgtgccagggcccgccgcgcgaccgctgtgccagatgggggaaggggacgcgggcggcggcgacacttacccggcaacgcctcctccttcgccggcggcagcagcagagccagcgacccccggcaccatcttccgccgccgcctagtcctcggcagcggttaccaaccgcccattcggcaccgctaagccgacacaaccgccggcgtcccgggcgcccgcccgccgcggccccgaactctaggaggcagggaggggtccgggcggacaaggacgcgagcaggcccctcggctctgggtctggggccgggggacagaaggccgcggcctgtcagagccgaggggcccaggcgactgggggattctgaggcaacgccgagggctcggcagggccgcggacaccgccgcggcttggtttgttattgtcgactccgtctcttcctccgcggcgcatgccgggaaacggcctgccgggggaggggcgcgcctggaggcgcagagaggcgtctacgcaggtccggaagtcggcagcctgccgggaagggggcggccccgcctccggctctccggccggcaggttggctgtcctggcctgaccctgggagactccgctggggccgcctgttatggtgctagctgccgtcccggtgcgtactttcccaaggtgaatttgaccttctttgcgacagctaggccctgactaaggtcgacccaccaaacactggatcgtccccaggcgaaagagagcttgttcccctcagcctgtcgcggaggagcggagccaatcgagggtctggtgtccccgtcgcctctccaggggcaacctgcggactaggccaaggtctgtaacaggataacgtaccagcgcctggcccaggcgttcctgccgccacctccccgcatatccggaccgccgggactgcacgcagctggcaagcgtccccctgttaactctgcaagggtggggcggcaccatttctcagaccaggtaaggcaagaaaacatgcaagagagaagagagggaagcctaggccaatcggaatgaaaatgtaaacgccacaaccacgttttcagctttacaaatactgaatcttgtagtgggtctagtgggttaggggttagcatgagcaccctaatggttgggagacagtttcaggggactcttgcatttgtgaagatgatcagtcacaggcaatgacttgaagccacgaggcttgaatattaaaatctgatgagcagatgttacacgtagaataattacataatagttctcaaattcctgttatatccaggaatatctggtatgagtgaaaacttggaggtgccttctctaaagtcatcaggaattctgagttgtgtttgtaaaaataggaggcacaagagggcaccaaactgaacaaaatgttaggtggaaactgaaaaacgttggttagcatgaacaatttcagttttcagtcacactgaccagtatctgtaagttaggattgagatgggcttgttttatttatttacttttaaatttgtgctgctacatatcccaaacaaatgtggtctttatcatcactggcaagccattttacttattggttaagctggaattttattacaccaccccagcaagatagaggagaaaagcgaaaattaagtagtaaatggttattatgccttaagggaaggtgtgaactggcaagacaaaagagccaaatttagtagtaaagcatagtcatcagcacacagaaaataagtggtgaggaggagtttggccagaaaattggctaagaaaaatggcagtatgaccaagaatgaaaagaaaaagaaagaaaagaaaaactgcagtatgaggcctgtaaagaacgtattggtacttgcacttcctcttattagtgacattcattattacaaatataacccaatttagaatgtaaaaatcttgctggagctcggtgcagtggctcacacctggaatcccagcacttatgggaggccgaggcaggaggattgcttgagcccaggagttggagaccagcctgggcaacgtagtgaaaccccttctctacaaaaaatacaaaaattagctgggcgtggtgatgcacacctgtggtcccagttactcagaaggctgaggtgggagaatcagttgagcccaggaggtcgaggctgcagtgaaccatcatggcaccactgcactcctagcctggacaacagattgttgccctgtctgaaaaataaaaaaaaatttctgaactatgccagtgataatctggtaaattataaatgttgtctgacttttttctttggaaaatgaattaattcagtcctaaccttctctcttaatcacaggttgcaataaattaccagaaacgactggttcataccttatacacctccagtgtaaatgttaagagtttgtatattcttaacagactcttaacaaacatcagtaattctttcctagggataagtgaaaatgtactaacattaattctattatatatatgcaaatatctagaggaaatactgtttataagttactaatacatgtatccatggtagtaggtcttgaaaagttacttttgttgcctattggacaccctctattctcccttccttaataaaacaaaaaaaagaacaaacaaaattctgtagcatcacttctcaaccaagctttctgataggaagtcctcagtccaatctcatttttggcctactgtgcatttcttacttaacttgcaaacagatcattaacaaggacctccaaattacagtaaattacagtactaagattttacttgaactttctaaagcattcgccattttaaattatttaacttttatactcctccttcccttttgtgctgtttccttcctggcgctcctaaatatctgtccattctttggacctcttccaaattttcagataattataatagtgtgcgaatgatgcaaaggtaatgtgccgtgggagagaacagaagagagaaacctaattctggcctcatcacattattgtttttttaaatttaataactattttagatgcttcagtagatttacagtgagggcaaaagaaaacagttttctttaggagtatggagggattatataggatgtacaataaataccctaagtacttcaaatcagttcagatctttaaaatcctatttttccttcagttctcaacttcaatatcacctactctgggagtcattccctaccatgcttgtttgtttgtttgtttgtttgtttgtttacagagtctcactctgttgcccaagctggagtgcagtgacaccatctctgctcaccgcagcctcccaggttcaaacgattctcttgtctcagcctccctagtaactgggattacaggcacttgccaccactcccggctacttttcatacttttattagatggggtttcaccgtgttggccaggctggtctcgaactcctgatctcaagtgatccacccgcttcagcctcccccacagtgctgggattacaggagtgagccacagcacctggccacatgcttgtaatttctttagattctcacattgtatctttcagtgtcatctaacatgctgactataagctcctttttaaaagatgtactgtacctggtatataatggtatgcactcaacaaacatttgacagtaccccacaacttgttcaggccctcaatttatacctgaattgacctcctatccatctccattatttactccatccaagaccagtctaatcaaatctcttccctgcctaacaactttcattggttttgttttgtatactagatacaatttaaacttttttttttttgagatggagtctctctctgtcacccaggctggagttcagtggcgcgatcttggctcactgcaagctccaccgcctgggttcacaccattcacctgcctcagcctcccaagtagctgggactacaggcgcctaccaccacgcccggctaattttttgtattttttgtagagacggggtttcaccatgttaggcaggatggtctcgatctcctgacctcgtgatccgcccgtcttggcctcccaaagtgctgggattacaggcatgagccactgtgcccggccctgggcatgggtaaacttcttaacctagcatgaaagtctctccatgataaggtatcaacccatctctccagtgtatctcccagcacttttctcccctttatatgtgctctatatgagtttcctcatccaggaatgttcttccccacttgttcacctttaaagtcatcccttaaaacacagcttggatgttagcagcttctaacttctagagtttccactcttctattaagctttgctctgtatctcacaactgtaaatttttctctcccctcttagtctgtgaaactcttaagattaagaactatgcattattaatttttaaattcctggaactttatggagagcttggcagtcagcaattaatacaagatttgctgtatgtaatacattctgcaaatttttatatttatattgatggttgactagaaagttactgtggaaaattcctgccatcaaatatctcataggcttgtaaaggggaccattcaaaacaattgcagtaacaaaggcagggtgcagtggctcacgcctgtaataccagctgaggtgggcagattgcttgagctcaggaatttgagaccagcctggacaacatggtgaaaccctgtctctagtaaaaatacaaaaattagccaggcatggtggcgcccaactgtagtcccagatactcaggagactaatgtgggagaatcaattgaacctggggacggaggttgccatgagccaagatcatgccactgcactccagcctgggagacagaatgagactccatctcaaaaaagaagaataataataattgcaggctgggtgcagtggctcacgcctcatgcctgtaatcccaacactttgggaggctgaggcgggtggatcacctgaggtcaggagttcgagaccagcctgaccaacatggagaaaccccgtctctactaaaaatacaacattagccagtggcgcatgcctgtaatcccagatactcagtaggctgagacaggagaatcacttgaacccaggaggcggaggtcgcagtgagccgagatcgcaccattgcattccagcctgggcaacaagagcgaaactccgtctcaaaaaaagaaaaaaaaaataaatataattgcagtaacaaatttatatgatattaattctttaccaaagtacattcagtttattgggaagatcatggtaaacatcttaattttgtcaactctgcctgaggcattcagcacatgtattaaatatttctcaaacaacttagtgtcattaccctaattttcttttaggcaatgttcaaacaaccagcaaccacaattcacataatttggctttattcaaagtatgaggcacaattattgttcatttttaaaagggttaaaaagatgtacgttttggactttgtttttaaaaccataactaatttggtgtatatgattatgtactatttagaggctgctggcactatgatgattaagttaatgttttcagtactgcttatagacctgaaagctgcccttctcagctggtttgtgggtactcaaacatactaataatgatgatggctaacttaggaatgaccatcttcaaagctagtgatgacttgatgagctcataagcaacactgtttccaatgctgcagcaacatagtcaagaaaacacttctagaatgcttaatttcctgaaagatttaaaccaatagattaagacaaaacatttgtagtcatttttcagattgaaagagatatctttttgcatcatgttttattaggttcttgtctttcattattttgaagagctgcctagcaaagtgtccaaaaatagagctggcactgtttataaaatgccttaaggcagaagttaatcagtcatgtagacacagatacagaactgattcaaatgtcaagtggtagttggacttcaggtggtgactttctaacttttactgtgatccacattaagaaatacagtttcacattgtgacctggtatacatacacaggaaaaagtacttgctgcttgtgatatactctgataccttctattgtttttttttcctcttgctagtcttacacattacatcgattttactatcatccaatggtttcagagatattagattcaatgacttaggccccaaaccttgagattctttgttcctgatttttctgtcagtgccttcctatttctgtcagtgcctcagtagtgtttataaataaatgcttctttttttttttttttgagatgggagtttcactctcgttgcggaggctggagtgcaatggcgcaatctcagctcactgcaacctctgcctcccgggttcaagtgattttcctgcctcagcctcccgagtagctgggattacaggcatgcaccaccacacctggctaattttgtatttttagtagagacggggtttctccatgttggtcaggctggtctcgaactcctgacctcaggtgatctgccctccttggcctcccaaagtgctgggattacaggcgtgagccaccgcggctggtcaataaatgtattttttaaaaagcatgacctaacggagctcatgaaacacttatgggtgtatcttagatgccagacatgggttttaaatttatcaacctgtttagttgtcttagcagccctatgcagtttctgtaaattttctttgattttacagatggggcaataaggcatggagtggttaagttgctaattcaatgtacttccttctagttagtgttcttaaattagtaactgtcaaggccaggatttgaacccaggtaatccaattgtacgggctatatcctatatatcctatgcatagcctatgctcccccttaatttggtgctggtcctgcaggggttaaaaaaaattggctcagcaaggtggctcccagcttacaccagtaatcccagcacttggggaggccaaggcaggtggatagccctgagttcagaagttctagacctgcctggacaatgtggcaaaaccccatctctaccaagaatacaaaaaaaaaaaaaaattagccaggcatgtggtggcatacgcctgtagttccagccacttgggaagctgaggtgggaagattgcttgagcctgggaggcagaggttgcagtgagctaagattgcactgctgcattccagcctgggcaacagggtgagaccctgtctcaaaaacaaaaaaagaaaaaatgtctagcaataggttacagagtttctcaatctcatacctaccagttaattctttgttataaggggctgtcctgtacattttaggatgttgaacctccttggcttctgcccactagatgccagtagcaccccagttatgacaatcaaaaatgcctctggacattttgtaatgttcccagagggacaaaatcaacccctttctcagaattcagggaaaacgtggtacatctatataatgaaatactatgcagccattaatattatattttagaagaatatttaaaacaggcctggcatggtggctcacacctgtaatctcagcactctggtaggctgaggtaggagaatcacttgaggccaggagtttgagaccagcttggacaacatagcgaaaccctgtctctacaaaaataaaagtaaaaatatagaccaggcgcggtggctcacgcctgtaatcccagcactttgggaggccgaggcgggtggatcacgaggtcaggagatcgagaccatcctggctaacatggtgaaaccctgtctctactaaaagtacaaaaataagttagccgggcgtgctcgggaggctgaggcaggaggatggcgtgaacctaggaggcggagcttgcagtgagccgagatcgcaccactgcactccagcctgggcgacagagagaataaaaaaaataaaaataaaaataaaataaaaatatagctctgtgtggtggtgcactcctctagtctcagctacttgggaggctgaggtgggaggattgctcgagccaaggagtttaaagctacagtgaaccatgaccacaccactgtactccatcctgggcaacaaagtgagaccctattctaaaaaaattgtaaaaatatgtatattaattttttttttgttttgagatagggtctcactctctcacccaggctgtaatgcattggcacacccacggcttgttgcagcctcaacctcccaggctcaagcaatccttccacctcactgtccctaatagctgtaactacagatgcccaccaccatgcctggcaaatttttgtattttttgtagagacagggtttcaccatgttgcccaggctggtctcaaactcctgggttcaggctctcctttcaccttagcctcccaaagtgttgggattacaggcgtgaaccactctgcccaaccaaaaaatatttaaagacaaaggaaaacaaagtagcaagctactctgttttactatgtttcgtattttaacatctctgaaatctgggtccatttaacagtggatggatagtggtcctccaagcttgtcaaccaatgccatccatttcctgtgcttactataagacatcaaaaacaccagattggaaaaaaatccaaactataatggtgagagaattgatgaataagatgtgttgtacaacattcccaaagacagctaggtacctagcaccacagctttagttcttttatggattctgtaaggaaatgcttgttgccagtgctttcagtgctgcaaaggataaattctgtggaaaaacccagacaatctctgagtcggaagtaatagttcaaaagtgatgaaattttagaaatacctttaccaatgtaatttgcttgtattttcatttttatgtatgggcaatataataaaaatgtgtctaatgaagtctaagaaagctttctaagtaagtacaaaattaaattctaagtgatttttcctatgtgtatatttttcttcattttccagactacatatttttgaaaaatgtaccattagtcttttgtaacttaaaacgagttctgttgtttatcatataaaatgaatgcttttttcccaattctctgaagtccatttattttaataacaccatttgtttttttgccttcttcctcaaatgatccctttgttttaatcaaccctacctgctatccattcatgcaaaatacttttcccaatagtcattccttttcagtatgatgtattaaaaggaccactgaactgaatgtctggaaacgtgggttccaattctacctcagccttctgtgttgtttccctagtagttcactcttcctactctccatcagattgtctgcactattcttgaatccctaattcccaccccttcccagttctctctttggtaaataatctcacctcctacaacactgaggaaatagaagccatgagaaaagaacttcctcttctgccctgaaatctgcaaacctatttgcatccacaaattctctccaacagtcactattctgtcccttctatttaaggtagtcgtgggtttttgactccatctcattttaccatctcattctgtcattctgtggaaccacttactaagtacaaaatttagttcatgtgtgacataccttacaaaacttaaatatctttaaaattgaaatttatccggtttcattgtttattcatttaaaattaaaaatcaagaagtaaaacactctatcatcaatatgatttagtagaaacaaattatatcttgtagatgttattgaaattcacttattagttgctggacaattgtttacataaaatgactttttaacaaagggtcaaagttaaaactcctaggcagatctcaaaactatcaagtagtatagattttttctttttggttttgtaatatttgtgtggcttttttttttttaacttttaaattttgactgccttgattaaagtttcagttaaaaaattttgctgtcaatttcttttctaaccattactattattgttgttctattgttactgaaactatagaggaatgggatgttaaaaaattatctactctgagtgtcaaatacacttcaccactggcagggctcagggctcttcattttttaataagttctagggggaattctaatacaaggaatggctttgagaaacaagactaaatttttaaaaatcctcacagtcctgctcaatcttctttctgtcaatagatgtcgcccctcccttgaaataagctcctcagaaaaatcctaatctacacacaaagctttctatgtgtttgtatgcttattatggattaatttgaactcatataattctcagatgtgccttaatttttaaaatatgtgtatatagtttatacacatacatcataagttggctgcattaaggagttggaaaatctgggacttcatttggatttggaaaatcagttaacatctataaattcaagttcctcattttgaaactgtgttggcaatatctactttagctacctcacattgttctataggttagaatgaaaaatcgcatgtaaaatatactgtagctctgacatttgtacggtccctacagaaattttacattagccaatcaacactttttgaaaaatctaactccagtggtttttaaaatgtatgaagtgcttgtattttagtacaaacatctagttacatttaaaacattttgtgaaaagaattgccataaaatatttttaaagttcacatctttcttaccgtttacattcatgttataggctttttgtctcctctcctttcatttttttctactcccagagttctggaagctgaccaaagagatacttgtgtgaaatgcttgtattttccctaccatatttaaggctctcaagagcaattttatgctcctgttttaagattttttttaaaaaaaattcaatatcaccaagaaatgaactgaaaatgacaggttttctggaagaaggttcagctaggctttattaagaagttaggaggccaggtgtggtggctcacgcctgtaatccaagtactctgggaggccaagacgggtggatcacaaagtcaggagatcaagaccctcctggccaacatggtgaaaccccatctctactaaaaatacaaaaattagttgggcgtggtggtgcatgcctgtaatctcagctacttgggaggctgaggcagaattgcttgaaccagggaatcggatgttgcagtgagccaagattgtgccactgtgctccagcctgggtgacagagcgagactccgtctcaaaaaaaaaaaaaaaaaaaaaaaagttatgatatgtcctcaacacagtgggtagtacagattcaaaataagtaaaaatgttaaagtccacattaagtgactttaaaaaattatctttttcctatttcatataactgcttcagaagtattgtttttacttgaaaatattttgttgtatttctgtacaatagcaataaacaattaaaatgcaattgagaggccaggcgcagtggttcatgcctgtaatcccaacactttgggaggccaaggcaagcagatcacttgaggtcaggagttcaagaccagcctggccaacatggtgaaaccctgtctctaccaaaaatacaaaaattagctggatgtggtggcaggcatctgtaatctcagctactcgggaggctgaggcataagaatcacttgaacccgggaggcggagtttgcagtgagccaagattgcaccattgcactccagcctgggcaacacagtgagactccatctcaaaaaaaaaaaaaaaaatctgtgaaacattctcttcccaatttcaaaacttttctacaaagtcacagtaatcaagatagtgtagtactggcataagatcagacagatcgaatagaattgaaagtccagaaatgaactaagtttaaagtcaattgatttttctcctgaatcaaggactagcaaaaaataataataataaaataggccaggctctgtagcacaggcctgtaatcctagcactctgggaggctgaggcaggaggatcgcttgaggccaggagttcaacaccagcctgggcaacatagtgatactgtctctactaaaaaaaaaaaaaaaaaaaaaaaaaaaaaaaattaaaaattagccaagcatggtggtgtgagcctgcagcccagccacttgggagtctgtggtgggaggattgcttgagctcaggaggtggaggctacagtgagccatgatcatgccactgcacaccagcctggtcgacagagcaagacactcaaaaaacagaaaaggatatttcaaaggaggaaggaagagccttctcaataaatagtgctgggaaaactgaatatccacatgcaaaacaatacagtggcactcataccatagacaaaatgatctcaaactggaccaaagactttaatagctaaaactataaaattcttagaagaaaacaggagtacatctcttcagctttgtattaggcaatggtgtcttagatattacactaaaagcacacttaacacacacacacaattagataaattggaccttatccaaattaaaaacttttgtgcttcaaaagatatcatcaagaaagtgaaaagaggccgggcatggtagctcatgcctgtaatcccagcatttggggaggcatcagtttgagctcaggatttcaagaccagcctgagcatcatggcgagaccccatctctacaaaaattaccctatgtgggggctcacgcctgtggtctcagctactcaggaggctgaggctggagaatcacttgaagccaggaggcggcagggctgcagtgagccaagatcaagccagtgaactccagcctgagtgacagaatctaagaccctgtcgcaaaaaaaaaaaaaaaaaaaagtgaaaagacaaaacatagaatgtgagaaaatatttgcaaatcacataacaaataaggaacaatatataaacaattcttccaactcaacaataaaaagacaacccaactttaaaaatgggctaaagatttgagtagacatttctacaaagatatgcagatagccaataagcacatgaaaagatgttcaacctcattactcactagggaaatgcaatgaaatcacaacaagataccacttcatatccaccagggtagtcaaaattaaaaaggcaatagcaagtgatagtaaggatatggagaaattggaacccttgttagtgggattacaaaatgttgtagccacttcggaaaacagtttggcagttcctcgaaaggttagagagttaactacatcgcgtagcaattccacttctagagaaatgaaaacatacatcacaaaaaaaaacacaaatgttcatacagcattactcataacagctaaaaagtggaagcaatccaagtgttttctaatgttgaatggataaccaaaatgtggtgtatccaacaatagaatattatatgtgatagaagagtttctgttcctcaaataataagcatagaatgactacgtgatccggcacttccactcctaggttatatactcaagataattaaaaacctatgtccacacaaatgttcagagaagcatacttaagtaggcaaaatggaagcaacccagatatcaactgataaatgcacagaccaaatgttgtttatccatacaatggaatataacctggcagtaacaaggagccaagtactgatacttgaaaacatgctaagtgaaagaagtcacaaaaggccacatattgtatctttacctttatatgaaatgtccagaataggcatattcatagacagaaaatagatgagcatttgccaggggttggaggaagaaagagaagaatgggatatgactgctactggacataagatttcttttgaaaatgatgaaaatgttctgaaattagtggtgctagtttcataacttgatgaatatactaaaaaccactgaattgtacactttaaaatgatgactttttggtttgtaaattatatttcaataaagctgttattttagaatatttaattatgtttttaaaaataagataagcatgaaatcaaccaagagaatagccacatacgaacctgtggctagctctggttcatttacgcctcactgaggtggtactccagaagaagaaatctaatggagcaatgaatgatagccaagatggggtggggtgtccgagtggttacccccgggtacagacgataaaggagtacactgtctatacgattgccatttagcaacaataaaaataactagaatcagtctgcttttattatcacctttctgccatcaaatcctaaacaatgtcattgaaaaaataaactctcacctcaaaaacctggttggtccaagccagggtttctcattctgttgtcattttgggccaaataattgttgtgggaggctgtcctgtgcatctttggatgtttagctgcatccctggcctccacccacttgatttcagttgcactccccacaatggtaacagccaaaagtgtctccagacattgccaaatgtcccgaaaggcaaaacagccaaggttgagaaccattgatttaagttctaaataaatgctgtgattgtctattgaattttagtaacgtgtaagcctcaaattagcacattgttattgcttatcttttaattatactctggggaagttaattcaaagaactcttgattatacaactggtccccaacatacaaggactcggctttatatgtgtgttggtattgaaagtacattcttaacagttctaaattgtttcagcttgttttgtgcacagctcttatctccaacctttggcactatagaaatcctagctttaaatagcagattcataatacacgatagcgccgtgattgtaaaggtgtcaaaacaaattgaataacttcagttctgttattgtataatatatacacaccattttctgagacatataggcagagttccctttctcttattttcacatgtctccctgaacctttaatttttttcaaaaaaacacattcatgtaatggaaaagtattaatttgtttccttttttgtactgtattattttatttacatttttatttgaaaaaatttaatgatagttacaaagtaaaaatcaataaaatatttttcagtgtcttctttctggtctgtatttcatttcatgacttaaaaataattttctcctttagaggaggaagtcatttaaaatgatctgtactaggtgtcaaatgtgctaggcacaccactgatttaaggaaagagataaagtacaccacgatgaaagtagaaaagaagaaaaagtgcattaagatgaaaaagaacataaatagatgaggggccaaggaatcgaaggtgagaaagcagaaaattgagagagaccaggaggcaaaattggcgacttctgaaatgagtagattatttaattgcatttgttctgtttttatttccttatcctttgtttgggcggtgggctaaggtctgtacattatcatctgttcttcccacacatttgaaagattagttgccaattaattactatttttaattcttcaactgctctgtagcttcagctgtgccttgccctgatccacgtcgttgcagaggcccaaaaattattctctaggtgctacgaaggaggaaagaatgcccagaatagggagctaacaaaattgaatggatatgtgtgagatattaggctagatgctttacataccttattccatctctcacaacaaactgcc

SEQ ID NO: 953 - DNA, 1112 bp, Homo Sapiens
tagcaatagactaagaaacatatttgtttgtacaaatgaatatcagggcacattatggttagaaactttaccccaagatgtaaagaagtgattcttgagacatttggtctcattgagcaaataaaggaccaaaaaaaaaaaaaaaagccttagaacagtctcgatatgcaagactgcgatgtgcgatgtacaggaatctcttagggagaaattcttggccagaatttacaacttgttccctattgccacattgctttattaaattggtgtaatggagcatggatttttttatattgtcatatgcagtgataatctaaaattctagagctatgattcatctctgaggatgttttactcatattgcatctagccgccccctacattaaaccaagtgtttgagaagagtttcaagaaatcttaacttcagaaggagttttaggaagttcctattgcaatctctgattaacgtggaaatccattctcttgataaatacttccactaacaaagaggcctctctttaaaagattgtccattccttttctggagagttctaaaagaggataatcaaaaggaaagacccttctttcactggaatttatgtcttagtaagtgttcatttcagatatattcacaagtaaaaagagagtaaactctaagactcaaaaatgggccatttctatgaaataaggacacaacagatcgaagctgaaagatttgatcaaccttatcaattgttgaaagacaagtcttatagaaggaagctcggccaactccaaaactgactcctttccaatgcttagtgatcatctggacacacttgtggaatgtgacattttggtctaacacaagcacagaataacatgtagcatatacccaaatgaaatgaatcactagcgaacggatccttaaagtctacaaaaaccaaccacagggctgtaatgaaagaaagtgatgacagacaagttataacatacagccagccaaattccgaacacagtattttggctgactagtcttggacatgggaagaattatgctgttcaatttacaacttattaaagagggaaagaagtcatcgatacagatggttggttctatatcaaagaagact

SEQ ID NO: 954 - DNA, 13231 bp, Homo Sapiens
ctcctgggccgggctctcctgagcgaagagcatcgggaagaggcttccgcggcagcctgcggcccccgcccaggcgaagaggccgggaggagaggagattcccttctgagaacgttcattgagcgtcgatgtgaaggccacggcattgagagacttgacaggatcttgctttgtcgcccaggctggagttcagtggcgcgatcacgactcactgcagcctcaacttctagggctcaggtgatcccccaccacggatcacctgacccaccaccacccccggctaatctttggtattttttgtagagactgggttttgctgtgttgcccaggctgatctcaaactcctgggctcagtgatccaccctcttcagcctcccaaagtgctgggattacaggagtgagccaccgctcctggcctctgagttcttctcatgggaggctgagaaaagtctgggggtctgggacagccagggccgggtttccccttccaggcaatgagaaagaacaggctctgcctcccaccataagagtcaatcccaagttccagatgtgtcagggaagcgatggagagccccagacttgaggcatctgcagacaggttcctgctcagacatccacgtggagggtgttagtatcctgggagccttcagaaccttgaagcatgccagcagaggagaatgagggaagataaaatcaaagtgacttatcacaattaaggaaatgtgctatttcatgtacaactgtgtgtgaggatgagattcctacctgccatactgaggtattatgataagaactaagagagtccaaattcctacaggatgaacagctgagggagcgatgcattccttaggaaggagtttagcttcccgaaggagacggcagctgagataggttctgagaaatagcattttcattggttccccgggcgccgtggctcacgcctgtaatcccagcacttcgggaggccgaggtgggtatcacctgaggtcaggagttcgaaaccagtcaggccaacatggtgaaaccccatctctactaaatacaaaaaagtagccaggtatgatggcgcaggcctataatctcagctacttgggaggctgaggcaggagaatcgcttgaaccttggaggcggaggttgcagtgagccgagattgtgccactgcactccaacctgggcaacaagagctaaactccgtctcaaaaaacccaaaacaacaacaacaacaaaaaacaaaattgaatgttcactggctgagggttagggtgggtggagagaaaatgccagttgtgtggatctgttgatgtaaaacaaaggcctagagggtggtaaactggaagcagttcaatgggacagtgcttgatgggactttggaggtgatgaggtttgatatagtttggatttttgtccctgcccaagtctcatgttgaattgtaatccccagcgctggcagttgggcctggtgggaagtgtttggatcatggtggtggatccctcatggtggatcccagttctcatgagatctggtcatttaaaagtgtgtggcacctccccaccacctctctctctcgctcgcttgctcgctcctgcttttaccatgtgatgtgcctgctccccctttgccttccgccatgattgtaagcttcctgaggcttccctagaagcagatgtcagcattatgcttcctatacagtctgcagaactgtgagccaattaaacttcttttcttataaattacccagtctagatgtttctttatagcaatgcaacaatagcctcttatgagtttggaaagggatctgagcccatatgccaaggaacttgcctgccaaatctggactttatccttcaggccctgggagaccagtgagagggtggcataatccactcttttggaagggtaaatgtggctgtgtgaagtgttggtaggggaaggcagggggtgggagatgagcatatcttgctgcctccttctacctgtcctccagcccccttaggcctgaccatggctgactttgcatccggtagctctgagatacagtgcctttgccaaggaccatatttgaactgatcattaatcaattcattttgcagatcattggtttaggtgtactcaggagaccaacaacaatatcttctctttgtttgacccctcctgtgtcacatgtatgatcacagaagagaccatgtttttggaagagaaacagaactggctttccattgaggcaaatgagggggctgccccatggtggagacacacagaagggtgggagagggactctatctttcattggaatagtctagtaagttaccagttctaacttggcatctaggacatataaatcatgcatttacttatccagcaaccttttctaagcaccttctctgtgtcaggccctgtgctaggtggagctggaagatatagctcacttgcttgtaaggaacttgaagtctgtgtgggggacaaatgtataaacagaaaattacagttcaccatcttagtgttccagaggaaagaagcacttagtatgaggtaccaggaagaggtggggagaagggagtggctttacatccttaagttctgggtgtttgaagagcagccttagacactagccacggaggtgggcttgggtaggccccgccgtggggtttgaagacccaaaagatgttgggtcaaggaggacatgggtgtctagtgtgggagcaagcagaagggtgagctcaccgaagcactgttttacccactgtactacgtttctattgctgctaaaacaaattgccacaaacttagtggcttaaaacaagggcgttatcttccagttctggagggcaggagtctaactcaggtctccctgggctagaatcgaggtgtcagcagggctgggttcctttctggaggctttgggggagcatccatttccttgccttgcccagcttctagaggccacctgcattcctgagttcatggctcccttctgtcttcaaagccaacaacagtgggtgagtcactctcacattgtttcactttgacctcttcttttatttttctgagacaggatcttgctctgttgcccaggctgaagtgcagtgacatgattatggctcactgcacccttgacctccagggctcaaatgatccttccatctcagcctcccaagtagctgggactacaggcatgtagtaccatgctcggctaatttttctattttttgtaaagatggggtctcgctgttgtccaggctagtctccaactcctgcgctcaagtgatcctcctgccttggcctcccaaaatggtgggattacagacatgagccaccacaccctgcccactctgaccctttctgcctcctgcttccactcttataaacgtttgcgatgacattggacccacctggataaaccaggacactctccctattttaaggtcagcagattaacttcctgaattccatctgcaacttttttttcttttttttttttttttgagacagggtttcagtctgttgcccaggctggggtacagtggagcaatcatggctcactgcagccttaacaacaactgggctcaagtgatccttctgcttcagcctcctgagtagctgggactacaggcacgtgccacaacgcccttcaaattttattttttgtagagatggtgtttccctatgttgctcagggaagtcttgaactcctgggctcaagtgatcctcccgctttggcctccaaaagtgctgggattacaggcgtgagccaccgcacctggcccacaggcagcttaattcccttttgccatgtaacccacatattcacagcttctggggattgtgatgtggacattgggggaggcactgttctgcctcccacacccactttaccttcagggtgaggtctcggcctggcctatcctttcatggtatctacctgtaatcatggggaaaagcctttaaaaattaggcaagggaattaaaatcatcacgataagtaaaagcaggcaaggaacttgctggaggagaacagagatagaataaggcagaagtgtctatgtatggggggggggagtcaaaaggggtggtggaggtgattgaggaataaacagatatgaattgcttatttaaggcttgaacctggtgtcatgagagaaatggtggtggtctcaaaaggggccatggggtggggccacagaagagacacggccccatctgcatgttgaccatactcagggtggtgaggaaaccagcgctgtcctgcagctgggggaacctcagtggtctttggggatgagccctgaacctcaagtcaagaagtgtgagttctagtccaggtttcagccacggtgattgagtcatgcacgtgggcctctgacccctcatcagtaaaccgggggctggtctagatgaccccaaggctctcacattcatttctgcactcttggtctctgctgggcttctgggacatcggttagtatggccttttgttaggcacatgccaggactggggctgtgcaggtgatgtggaagggttcctgattccctgttcccactggagcctgctctacagaaggaaccccttggatgttgctgtcccgggcttcagcactcagaactccttgctctttgtggccatcccagctctctctgtcacgtgagcccttgtccccagctgaatcactatgatgagttgtatgagctttgacaacaggtgggggatgacatgcagtccccctgacccaaaggagactgaaacgaagcacctcttggccaggccaccacggtgccccacagccgcttcaccggctgtcccttgtcatggccacgggcccagacctagttcctcctcagtgacggggggttggggcccctacctgccctcagagccctaccaccagtgttgggcattggggctaggctggagctgggctctgagcccagagctggtggtggtttccaggcctgtgggagggtgacagtgaggctgtgctgccgctatcacctccggagagagcggtgcatgggaggtggaaagcactggacctggactgtggctcagttgagggacacatggcatgtacttttaccacacaagtttatttaaataaaagtgaacacatatgcaggctggtgcccgaggggcagggggtggggagggcaggtgggaagcagacagacaatggggtccaggcagagtttgtgtggtgaaccaggctgctggagggagtggctgggggcctcagggcagcgctgggattcagtgctggggcagggggccttgggtgggtgagcctggtgccaggaggtcatttccatccctcacatgcccccctccctttccctgaccccctgggcctacagcactacctcctcagccccctctccctctcctgacatcagccttccccttagctactgagaagccaaaagacaaaataaattagaatgggtgagtcctaccccagcccccagccatggggaagggaagccaagccaggcacactgcgccggagcccgtgctgtcagctctggaaaagaacaggtaaagtgcaaggagaatccagtaagtaaaaatataccaatgactttgtcaaatacacagctgctggctgtcaggagcaggtggctggctggggcgggtggcagcagcaccctgggaagtgttgggcgacacagcagagagacaacggaaataaatagggtgggtgtggacaggggtcccaccaactgggccagcaccacccaggacgggcttctgcctgctttccggccccatgcccccaagcccccctcgcctggctccccagtgctgcagcactgacacaaagcacccggccgaccgtgttaggaaaggactataatgtgggagtggagcagggagggaggcacggggaagctgtgcagtcagccagggctgcggccgccctcagtactcgtcctggtcttcttgttgatgctcttcaatctcatcgtcctcagggggtgcgaatccttcctggagggtgggagagagaggaaagtggtgggccaggcaggccaggcagggcttctcaggttctgtaagtagctgaagagcaaggggtcaggagtccaggagccctgctaatgggtgaccctgggctagtgacttcacctctctctcatcagtaaatgttctccacggtcccttctggccctatcgcgcttctggtcttagggccaggccagactggggagggcccaatgggcctgggagtgctcacctctgtggcatagaggatgccaatgatgcctgagataacagggctgttttcactttcatgctcctggcagatgagctcgatgtcacgaagtttgctgaagtagaagtcacgttccttctccagcccatccactgtcagcttcaagtccaccagctgcttggggacaaagtgatgttcaagccagaggtccccacctcaggttcccctgcctgccctcctctcgtccctgcagacaccccaagggcctggctttggtgacagggctatctcagctacccttacccatcccactcacctgttggttgagttcaagaatttgggcatcagtctcatggccgccatttcgggctgatggaggattcttccggagaatgcaggggggggccacattgctcagccggccagaggtctgcatgttttttgggcctgtgggggacgtcctctgtggaactgcccagaggaaaagagtcaggtaagtccacgtgagcccacagcgcacgtggcaggagacagcctggtgtgaggactgcgggggcaggcccatgcgacaggcaggcactctcacccccctgcccccaccccaggaagggcatctacagctaggccccgagtcttggccacatggacactccagcagctgggcagccctttggcgagcccgggagagcagaaactatagggaactaaacaaggtgtgaggtgttggggcagggagagagctggcctgagggatagaggagagaaattaggacgcaaatttggggaagtagagttggaagggtgcgggaccctctcgtactcatagctagaggaaaggcagctggcacagggtctttcctaacagaagccccagcccaaagccattgtccctgggtggctgcccctccaggggccctgtgtcaggatgggctcttttgccctctgctgggctggaccaggtatctgcacagtggtggccaaatcagggaccccagctcctccccagcgcagccagcatgccgtggcgacttgctcactagcgactgcacctccctagacagagcgggctgcttctagtgcaaagcaagcaggcgggcgagtggggcaggcccaggcagaacagcagtgcagacagaggaggtggctctgctatgacggggtccgacgcgggctggggctgctcctctcccttcccctcccaacgctgctgcttcccaaaggccctattgcttttctcccttcccctccaggacccagacaaagcctcgtttctagagactcatcttttgaggacttaggactattgggcctttagagtggggaaaggtgtgatccagcttggcaactcctgcccctggccatccagggggcagggggcaagaaggggctgtggtgctggcaccaggctcttggtctggatgcacctggatggagaaaccaagccaccttgctgccccatcatcttgaggcaaacaagttagctcgtgctatgaaacaaagtgccttgggcctcctaccccagttgccaccatggctggtgctggtggctctcctcttagaccaatttgtggagctctctcacccactactttcactcccccggtctaactggccagcaggcggcgtcatccgaactccgtgataacaagtctcctccaggctggcagggccgggccgtggcccagggggcactcctggctatagaggcctgccggcccggccccccacgctccctcccccggctcgggcacgttacctgctgtgccaatgagtttcttggatttgttgaagatctgatcacctgggttaggaggtggcgctacgtcctggccctgccgcgccagcagagggttgtaatcctttccatcatagtttgcgtcaaagaatttcttaaaccactgaataaactcaaaattatcttggaattttcctttcactaatttctctacaggaatgatctgaaatagaccacataagcagagtactttagccacctgctgctgtaggaccgccttcctctgctgagggccactgctctcaggaaagccagcccctgggctgcagcgtcctccaccttctccacttgcccccctcccacggcaccagagcagacaggtaggctggtaggccctagtgtcagatccagaggcatcccttctctacaggcaccgtgtggaagaactgtgtggggaggcgtcccttggctctactgcctgcgtgtgggctgggggtctgcagccaccgaggcagtagagtgagcagagacactttcttgggccctacagagacagagagaggtggaacttcacaggagcggtgcacagagctcagtgttggggtgggcagggtccagagaggaggaagggaaaggaatgttgtcatgatggcatggcaagtgttgtgggcttttccattgtgccttgagcagggggaaaattccctctggagagtcgggaggtggagggaggcacgagcaccggaatgaccccagcagccccagttgcctgggctggtgggtcctcttcttccccagggtcacactgctcctcagggccccccagagcgcaggcacctactttgtcaacacccatcttcttgaaagctgcttgcagcaccttgaagttgtggatgtattcgtgctctagtttggcctggaacttcactttcctcaagtgcacacagccggggaagagcatgtccatgaactggcagtaggctgcccctgtggagaaggatggctggctgaggggtcttgctgctctccttctgtgagctgctctctctcacttccccaaaccccgtctcctcttctctctccttgttctgggccagggaccagtcctactttcaggatagacatggccagaatccccccagctttccaagaataaaagcaatgactatttattgatgcgtattatgaaccagcaccacaccaaacactgcatgtaggtagggcaatcccaacaggaactctagttagttggtgatactatctccatcttatggatgagaaaactgaggcctagggcagtatagtgacttgcccaaggttgcaccaccagaagagctgagagctggacccagagaggtgtggtcagacctgtggctctgctgccatcctggctctcagctccccgctcctcctttccctgcagtccttcatggtgcctctcctgctcttctctttccctgcttccatttcttgacttcagctccagacagtctgactagttcagggcctccagctctcctccttaatctaatcacaagctacagctatgggctgcataacgatggtttggtcaacgatgaaccacatatatgatggtggtcctacaggattataataccatgtttttattttattatcaccttttctatgtttaggtatgtttagatgtgcaaatacttaccatgtgttaaaactgtctgcagtatttagtacagaaacatgctgtccatgtttttagcctaggagtagtaggctataccatatagccgaggtgtgtagtaggctacaccatccaggtttgtgtaaatacactctgtgatgttcacacaacaacaacatcgcctaaggatgcatttctctggccacatcagtcattcagccatgcatgactgtatattccctgttgtggctgctctgccttccgacctttctttcctttccttccagcagggccacttcccatattcccagcctcctacctgaacaaagctgttctatcttggtatagttgaggtgcagggagtcgttgacccatgcaagcatatcatggcgactcagattttcactggtcacagatgtggagtacacattgacggccataccccagctggaaagcaagaagaaaggtgaggtcagcactggggcctcatgtagctccttagctgtcaagagagaggggctgtatgatactgggaagtaagaaacattccctccagattggcctcgcagtttatccccagagggagggtctttattccttagacatttcatgagcatctactatatgctagacgtgcaccaggagccagtaattccaagttaattaagaaatggcctctgccttgaggcatttacagacaggcagatcccctcagtagggagtgatgaggcagtgaaacaggcacataaatgttcagggacagcacaaagaagggtgtgagcgcatctgctgggcagggtcagcgaaggcttcagagcagagatgttggagcctgagaagaataggaattttccagacataaaaagggatgggtggaaggcatttcagccacagggactagcaagaacaaaggcagagcttattccgggcactctgagtcgtggagcaggcccggggagcagatttttctgttggggtgtggcacaatgaggttggcagggacaggttgccaggcccttgtttaccagaaggaggaatctggactttctatttggatgacaggaagccattagagggttttaagcgacagtaacctgaccagatttgtgttttagaaagccagctaacctttgcctctgctccgacttcagactccacattcctgtggctgatgcagaggcatctaaattctgcttgtccacaacctttccttagaatatgcttctggctcctgtattcattatcccagtgaatgtcatcaccagcaattaatcaccaccttagaaacctgcggggtcatcccagacagcttactctccctcatgcacctatcaagtcattcctcaagtcctggaacccgacttcctcaattcgcccttttctgcttaccctcaggatttatgcataccgttgtcccttggtattcatgagggaatttgttccagaacatctccccataccaaagtcaatgcacagtcaagtcccttatataaaatgatgtagtatttacagttaacctacacacatcctcctgtatgatttaaatcatctctagattacttataatacctactaccatgtcacttcgatgtaaatagttgttatactgtattgtttaggaaatcatgacatgaaaaaaaagtctgtaagcaatgcaacaatcctttttttttcctgaatatttttgatcggtatttgattgaatccacagatgtggatcccacggatgtgaagggctgactgtattttctctctagcccaggctagcaggagcctcctaaaaggccttccagcctccagtctctccctcctcttaatccatccttgacattgctgtagtcagaatctacctaaaagcaggtctggccaccgccctcccccacttcaagtcctttcagccagcagtcataaaagagacactccttggccgaatttgccttgcagacttaaactgttcagcactcatagtgttggaaacagttttgaattagtgcccaatattttaaagttcagatgtttaacaacttgggatttctggcttcttttggccactctgaccctatgctcccgcactgaaaccagcagttggagtggagccagcagtgagcctccttcccaccccagaggccaagggtcagctgctgctgctaactgacttgcgctgttaagaaaaggacatatttcttgtaaccacatctttatcagaaatggaaaaacaagataggtcaaaaggactgtgttttccgagaattgtgaggacatgtgtttctggagtgagtgaagaatatttcttcaggtttaatatgtaaagtgtctctgtgaaataagatacatcttatacaccttatattcttacagaaagaatatttccctgcctgtcgcaggcatctgctgttatcatgtgactcctcctgaccacttatcaaactcataaggggaccccacctcttcagccttatctcctactttgattccccagttaggagctataggcagcttcctactcaccctctgtctggaatgccgtccccaccccaaagttcattcattctctgttccatggttctcaattgtggccccagacctgcgcagtgggactatatggggatcagctggttagaaattccaattctcttgtcctcccccagacctaactaaatgagaaactgcctttgaccaagatgcccggaggatctgcaggcacagtcctgtttgagtagtactgctttagacagggaggctcagcaaggcatctgcagagctgtgtgccacttacgttcccacccctgaccccaagtacataggacagagcatgtttaacttaaatgaatgctttgaagaaaaatcatgagagaaaaccctcttctttattcctagttcttcctcctttgaaaaataaaccttgtccttcattgcccaggcaaagggaggccaggcggggccaaaaagccaagagaaacagaaatgaattattgtcttgggagcgcctaaagactcaagacctggcaatttcagagctttccgagagtaatgttgactgcacttgagtttcctcctccacaacgtctctgcgcccactgccctgcatcttggcccttgcgctcaccattggacttgtttaaatgcctgcgccccatgtcttgaagccaagagtggggtatccaggcctgtcacaggcaagacgttcagtaacgttgaaccattgagtgatgcctcatgtcctctcctctttctgaatcatgtctcatcaccttctggcctgggtccccctgccatccccctgccatacccccaccatccccccgccatcctccctcccccagcactcagcctcaggactctgctttagctccaggggactttttctgaccccctctgtgggagacatgtgcccatgatcctacagcaccctgggcacggctcttcatggcatcccacatggtctgttgaaatcatgtgtgtgagagcgggtgcggtggctcatgcctgtaatgccagcactttgggaggctgaggggggtgccgatcacctaagccaggagttcaagaccagcctggccaacatggcaaaaccctgtctctactaaaattagccaggcctgtaatcctagctactagggaggctgag

SEQ ID NO: 955 - DNA, 748 bp, Homo Sapiens
tctcaaaatcacaatgttaaaaaaaaatacaacttttgtaataacactgaaattcagtctgttgatcttcttataacaagtatagctaactaatgaggacatgaaatcactaacacagttgttgtctgcttacgtaagtaaaacagctgcacaagctgtgaaaagtccagagaaagcacgtaaaatgatccatcacacaaagtccaccattctttcccaaatccttgttacagaaaaccaaccaacaaacaaacaaatcaacaactcattctctagaagtacagggtgggacatggcaaataaagaaaataagctggcttgtgcaggccacctgcctgaaatatgaggtcatgattgtcaaacacatttggtcaactccagtaacttcagttcttcacaaagagaaaaccagtcattaaaccatagtggagactttttgtttttattatttttgtttttattatgttttgttttgttttgtttagactgtgccgcaatggcacaagatctgttcaggaggaatgtgacattaaatgcagctttgactttctggaggaagggaggtataaatgaacctatttggtaaggagagataattttagagttatggtggattgcctgcctatgctctctaatcactgacaggaaaaaaaaaacagtacatctcactcagctgctgtgaatacttggtgccttagtatagtcatctcttaaaagcaaatttgaagaatatggaatagttggtgat

SEQ ID NO: 956 - DNA, 1491 bp, Homo Sapiens
gttgacagagagttgaagactcccgtgcttctgggaatagtcattgtgagcatgtggtcagcccggttgctagaattcttcccatgagcagcttcaggggctgactgtggcctcatgcccagtacctttagccattttaatttaccaaacctcattgtcccattctcttttcaggttcttggccataaaatatggcttttggaaaaataaagctgagacttggagttcacggtgggggctcccccatctgtgaacagaagcagaagtttggaactgccttctttactgctcgagagggaaaacttgagtgaaaaccaggatgctggcgaatgttgagtagctaagctgcacaggaaataccacttgatgacctgcgatctggggaagccgcgccagggctctgcgaagctgcggacgagggaggcgtcagtgtgggggctgcagctcagctccgggggggacgcgcctttctccacgggacctggggctcaggtgctcacgaggctggggcgctgcaggccacccgcaggggaaactgaggccctccattttgtggggctggaagacctttccttccaaaagcaggtgtaggcgggagcacctgtgcagtccctctgttcagatcctcacccacttttaaatcaggtaattgcttttcttgttattgcattgagttccttatgtattttagatcgccgggtacccttcattttactcctgaggctgtaacttggacaaagcgctttctgctgctttggatgaaaaattcttttcctccacaggaaacagcagatgaaatgcacagtgtgaaggacaaggattctgctgagagaattgctccgagggttgctcaagtgatcatgggaaataatgcatcaaaccattctttaggtatttttttaaattaggaggtaaaaaatctgtgctgtttgccaaaatgattcttacacagacaagctaggaaaattgctctgaaacatgacacagactcctgatttggcccaactagggtgtgaaggatgaaatccatcctgagcccttcatccctctgctttctctggtgcagatgcagctcaggtgtgccttttcttcgcctgtgcccatccacctgagatggaccataaccataaaagtcagaaggcactgacccttcaggacgtgacagggttaaaagatgctggagggaaagtctgtcattgacttttattcacttcctttctccattctgccatttggaagaaggtaagcaacttaacactattttagaccatatgttgtaaactagcaggaaaatgcctttgagctgatgatggtggcccgaacacagtgaacctgtcttaaatccctgctttaaacccttaagggtgtcacttacaagagatactatttgaagtcttcccatgcatgtgtagggtggggggagtaccaacagctcatcgaatgggctccatttgaaagatctggatggttgcctttatttgtaactagttt

SEQ ID NO: 957 - DNA, 894 bp, Homo Sapiens
actctgtgttagccaaatgccagcttgcccacccaaatgctggactgaagtctaacacgttccaacagcaaatctgcagacactccacccaccaggacagctgctcacgcgtgcaaccctgtgggtccagaagatttcgagtgcagacacgtgggattcaggagactggttcccaggctctctgcatccataggagcctgctggcaaatgtgctgagaatggacatgcctgattcgctccaaggaactgctcctttcctgtgcctctttcatcatggcctgacacaggcgtcacgagggcaaggaaggccttggagccccctcatctgtccctggggcatcttgtacacaggtgggctccacatgaaggatgagggaccaccaaggctgagttcagtaagagaactcccccagtaatgggtaagagcccccagtaacatggtcggcttgtcatcctttgattttaacaaaatggaaggggaatctcactgagctaaaaatcaatagatcattgaaaataatccttaatgacagagaatggatgggccacaatgttttggcatatagctcaggcgttcagtgaaaatggcactgctataacaagactcctctctctccatttatttacatgaacacattttcagacattctacagaaacaaaaagaagcgaccaccaaaaggagggaaaaaccaggagcgcacacgtttctgacaaggtcttctctggaaatgagtcaggtgtgctcatgaactgagtgaaaaaccaccacacccagctcgctaagagatgcatctcagagcaatcataactttttatgtccaacaattatcaaagtatgtaatgtatcctaattgcttgatgtgaacaagtgataattatgataataattccat

SEQ ID NO: 958 - DNA, 1236 bp, Homo Sapiens
aaaacatgtatattatatttatccacctgtcatcattttcagaaatctttattatttctttagattcaaattttcatctggtagcatactctttctgtgtgaaagatttaacttcaatatttcttgcagtgttgatatcctgttgataaagtttttcagctttcatatgtccaaaacactctttatttcacctgcatttttgaaagatacttttgatggctattgaagccttggtagatagctttgattttattcacttttgttttcaatactgtgaagttgatgctctgttttccactggcttggatcattttttgatgagaaatctgctatcattcttatttttgttccttgttatatgatgtgtatttttttttcctttgctttaaatactttctcttcactgccgatggtcagcattttgataatgctgcaacttggtgtggtgttcttcatatttcttctgcttggggttgattgagtttcttgtatctgtgggtttataacttttgtcaaaattgaaattttgtctacaatttctttaaatatttttgtattctctcttcttttcctctcttctgggattccagctgtgaagtgatgagccacttgacattattccacagctcactgattttttttttttttttttattgagatggagtttcactctgtcactcaggctggagtgcagtggcaccatcttggctcactgcaacctctgctgcccaggttcaagcgattctcatgcctcagcttcccgagtagctgggattacaggtgcctgtcaccacatctggctaattttcttgtatttttattagagatgggttttcgccatgttggccaggctgttctcgaacttctaacctcaggtcatccacccttctcggcctccccaagtgctgggattacaggcatgagccactgcatccggcctgatgttcatttcttagactttttttctgtgtgtgtgtgtgtgtgtgtgtgtgtgtgtgtgtgtgtgtttaacttagctggttcctattgctatgtgttccagttctaaatttttcctgcaatatctaatttgctattaatgtcattcagcatatttttctgagatattttattttcaatgtctagaaatttgttttgagcttatttatatcttgcatttatttctacatgattttcatactctcctctcccttcttgaacatgtcaactttatttatagtagctcttttaatattt

SEQ ID NO: 959 - DNA, 15126 bp, Homo Sapiens
ccttcgctctggtgaggtgaaccgcagtctgaggaagacttcgctcaatcgtccctttccacacccagggtactggtttaaggtaattaagcaaatatggagcagtatgttaattgagtctctgacgacttaatgtttagtcgaaatcctttgtggaattgtccagctatttcatattctggtgcactatgctttaaagcacaatggagagccagactcgtgggtttgtatgttgtactcattttaggctggaaatgaactctcatttataaaggatatatagatatataattatattatgtttaaataatttatacaaatatataaatttttatttccatattatttccataggtttttgaggaacaggtggtgtttggttacatgagtaagttctttagtgatgatttgtgagattttgatgtacccatcatcgagcagtatacactgaacctaattttgtagtcttttatccctctcccccttcccaacctttccccgagtcccgaaagtccattgtgtcattcctatgcctttgcatcctcaaagcttagctctcacttgtgagtgagaacatacgatgtttggttttccattcctgagttacttcatttagaataagaataatagtctccagtcccatccaggtttctgcgaatgccatttattcattcctttttatggctgagtagtattccatcattatatatatatcacatatatatataccacatatatatatatatatatatatatcacagtttctttatccactcattgattcatgggcatttgggttggctccacatttttgcaattgcgaattgtgctgctataaatatgcatgggcaagtatctttttcgtgtaatgacttcttttcctctgggtagatacccagtagtgggattactggatcaaatggtagttctacttttagttctctaaggaatctccacactgttttccatagtggtgtactagtttacagtcccaccagtaatgtagaagtgttcccttttcaccgcatccacaccaacagctattattttttgatttttttgattatggccattcttgcggaagtagggtggtacatacggcatagcagttttgacttggaattccctgatcattagtgatcttgagcattttttcatatgtttgttggccatttgtgtatcttcttttgagaattgtctattcatgtttttttgttttttcttgagacagagttttgctcttgttgcccaggctggagtgcaatggcgtgatcttggctcaccgcaacttccgcctcccaggttcaagtgattctcctgcctcagccttccgaccagctggtattaccggcatgtgccaccacacccggctaattttgtatttttagtagagacagtgtttctccctgttggtcaggctggtctcgaactccagacctcaggtgatctgcctgcctcagcctcccaaagtgctgggattacaagcatgagccactgcccccagcccttttcatgtttttagcccagtttttgttaggattttttttttcttgattatttgtttgaattcattgtagattctggatagtagtcctttgtcagatgcatagattatgaagattttctcccactctgtgggttgtctgtttactctgctaactcttccctttgccatgcaaaagctctttcatttaatcaagtcccagctatttatctttcttttcattgcatttgcttttgggttcttggtcatgaaatccttgcctaagccaatgtctacaaggggttttccgatgttatcttctagaatttttatagtttcaggtcttagatttaagttcttgatccatcttgagtttatttttgtataaggtgagagatgcagatccagttttattctcctacgtgtggcttgccaattatcccagcaccatttgttgaatagggtgtcttttcccccactttatgtttttgtttgctttgttgaaaatcagtcggctgtaagtatttgggtttatttctgggttctctattctgttccattggtctatatgcctatttttatgccagtaccatgctgttttggtgacagtagccttatagtatagtttgaaatcaggtaatgtgatgtctccagatttgttcttttcgcttcatcttgcattggctatgcaggctcttttttggttccatatggattttaggattattttttctagttctgtgaagaatgatggtggtattttgatgggaattgcattgaatttgtagattgcttttggcagtatggtcattttcacaatgttgattctacccatccatgagcatgggatgtgtttccatttgtttgcctcgtctgtgatttctttcagcagtgttttgtagttttccttgtagagttctttctccttctttgttaggtatgttcctaagtattttatttttctaataaaacaaaatacttttgccgctattgtcaaaggaattgagttctttgtttgattctcagcttggttgctgttggtgtataggagggctactgatgtgtgtacattagttttgtatcctgaaactttgctgacttcttttatcagttctaggagcattttggagaagtctttagggttttctagatatacaatcatatcatcagcaaacagcaacagtttgactgcctctttactgacttggatgccctttctttctttctcttctctgattgctctggatgggacttccagtactatgttgaagaggagtggtgagagtgggcatccttgtcttattccagttgtcagagggaatgctttcaacttttccccattcagtattgtgttggctgtgggtttgtcatagatggcttttattacattgtggtatgtcccttgtatgccagttttgctgagggttttaatcataaagggatgctggattttgtcaagtgctttttctgcgtctgttaagatgatcatgtgatttgtttttaattctgtttatgtgatgtatcacatttattgacttgcatatgttaaaccatccctgcatccctggtatgaaacccacttgatcatggtggattatctttttgatatgttgttggattcaattagctagtattttgttaaggatttttacatctatgttcatctggaatattggtctgtagtttggttttttttttttttttttttttgggttatgttctttcctggttttggtattagggtgatactggcttcatagaatgctttagggaggatttcctctttctgtgtcttgtggaatagtgacattcttctttaaatgtctttaaatgtcacaggatcagctgtgaatctgatcctggactttttttgttggtgattttttttattaccgtttcaatcttgctgcttgttattggtctgttcagagtatctaattcttcctgattcaagctaggtgggttgtatctttccaggaatttatccatctcctctaggttttctagtttatgtgtgtaaaggtgttcatagtagccttgaatgatcttttgtatttctgtggtgtcaattgtagtatctcccatttcatttctaattgagcttatttggattttctctcttcttttcttgattaatctttttaatggtctatcaattttatttatcttttcagagaaccagctttttgtttctttttttttttttttgtgatggagtcttgctctgtcacccaggatagagtgcagtggcgcaatctcagctcactgcaagctctgcctcccgggttcatgccattctcctgcctcagcctcctgagtagctgggactacaggtgcccaccaccacgccgggctaattttttgtatttttttagtagagacggggtttcactgtgttagccaggatggtctcgatctcctgaccttgtgatctgcccgcctcggcctcccaaagtgctgggattacaggcgtgagccactgcgcccggcctatttcatttgtcttttgtatttttttttttccatttcaattccatttagctctgctccgatcttatttcctttcttctgctgggtttgggtttggtttgttcttgtttctctagtttcttgaggtatgaccttagattgtctatttgtgctctttcagactttttgatgtaggcatttagggctatgagctttcctcttagcaccacctttgctgtatcccagaggttttgataagtcatgtcactattgttgttcagcttgaaaaatttttaaatttccatcttgatttcatttttgacccagttgtcattcaggagcaggttatttaatttccatgtatttgcatagttttgaaggttccttttggagttgattttcagttttattccactgtggtctgagagagtgcttgatataattttaattttcttaaatttattgagatttgttttgtggcctatcatatgatctatcttggagaaagttccacgtgctgatgaatagaatgtatattctgcagttgtttggtagaatgttacgtaaacatctgttaagcccatttgttccagggtatagtttaaatccattgtttctttgttgactttctgtcttgatgacctgtctagtactgtgagtggagtattgaaatcccccactattattgtgttgctgtctatcttatttcttaggtctggtagtaattgtcttataaacttgggagctccagtcttaagtgcatatatatttaggattgtgatattttcctattggacaaggccttttgtcattatgtaatgtccctctttgtcttttttaactgtggttactttaaagtttgttttgtctgatataaaaatagctattcctccttgcttttggtgtccatttgcatgaaatgtctttttccacccctttaccttaagtttatgcaaatccttatgtgttaggtgggtctcttgaaggcagcaaatagtttgttggtgaattcttatccattctgcaattctgcatcttttaagtggagcatttagactatttacattcaatgttagtattgagatatgaggtgctattccattcattgtgctatttgttgcttgtataccttgggttgttttttttttaaattgtatttttgttgtataggtcctgtgagattgatgctttaaagaggatctgttttgatgtgcttccaggatttttttcaagatttagagctccttttagcagttcttgtagtgctggcttggtagtggtgaattctctcagcatttgtctgaaaaaaactgtatctttccttcatttatgtagcttagtttcgctggatacaaaattcttgggtgataattgttttgtttaaggagactgaaaatagggccccagtcccttctagcttgtagggtttcttctgaaaaatctgctgttaatctgatagattttcctttataggttacctggtgcttttgcctcacagctcttaagattctttccttcattttaacttttgataacctgatgacaatgtgcctaggcgatgatctttttgcgatgagtttcccaggtgttctttgagcttcttgtatttggatgtctaggtctttagcaaggctggggaagttttcctcaattattcccccaaatatgttttccaaacttttagatttctcttcttcttccacaagaatgccaattattcttaggtttggttgtttaacataatcccagacttcttggagtctttgttcattttttctttattcttttttctttgtatttgttggattggattaatttgaaaaccttgtcttcgagctctgaagttctttcttctgcttgttcgattctattgctgagactttccagagcattttgcatttctctaagtgcatccattgtttcctgaagtttcgattgttttttatttatgctatctatttcacggaagttttctcccctcattttgttttttgttgttgttgttgttgttgttgtttcttttgtttagtagagacggggttttgccatgttgctcaggctggccttgaactcctggcctcaagtgatcgacccacctcggcctcccaaagggctaggattacaggtatgagccaccatacctggcctccccgtatttcctcttatttttttttatttctttaaattgggcttcacctgtctctggtgcgtctttgattagcttagtaactgacctgaattctttttcaggtaaatcagggatttcatcttggtttggatccattgctggtgagctagtgtgattttttggggggtgttaaagagccttgttttgtcatattaccagaattgtttttctggttccttctcatttgggtagtctatgtccgatggaaggtctagggctcaaggctgctgttcagcttcatttgtcccatgaggtgttcccttgatgtagtactctcccccttttcctagggatgtggcttcctgagagccaagctgtagtgattgttatctctcttctggatctagccacccagcaagtctatcaggctctgggctggtattgggggttgtctgcactgagtcctatgatgtgaaccatccacaggtctctcgaggctctgtgtgtgtgtgtgtgtgtgtgtctgtgtgtgtgtgtgtgtgtgtgtgtgtgtatatatatatatatttatttttttgagacggagtcttcctctgtcaccaggctggagtgcaagtggtgtgatcttggctcactgcaacctctgcctcccaggttcaagtgattctcctgcctcagcctcccgagtagctgggactacagccgtgcaccaccacgcccagctaatttttgttatttttagtagagacagggtttcactacattggccaggatgatctcaatctcttgatctcatgatctgctcaccttggcctcccaaagtgctgggattacaggtgtgagtcactgtgcctggtctttttttcttcttttttttttttttgagatggagtctcacaccatcattctggctggagtgcaatggcacgatctcggctcactgcaacctctgcctcccaggttcaagcaattcttctgcctcagcctcccgagtagccgggattacaggtgcccgccaccatgcccagctaattttttgtatttttagtagagacagggtttcaccgtgttgatcaggctggtcttgaactcctgacctcgcgatctgcccgcctcagcctcccaaagtgctgggattagaggcatgagccaccacacccggccgagtctgtatattttttaacaaccagtttgtgatctgaaattggcataagattcctattgtcacacatgtgtttgcaattaattcaaaagtatggacatgtaactattggataagtttgtcatcacgtttatgaatctgattttaaaagacagatctgttatttgggcaagagttgaatgaagctccgtaagtgctccttccctcctctctttctcccagagggtcatgctgtttggcccaggctggagtgtgcggtggcatagtcatagctcattgcagcctcaaccttctgggctccagcaatcctcccacctcaatttcccaagtagctggaaccagaagtgcatgccaccacacccggctaactttttaaagtttttttgtagacaaggggtcacactatgttgtccaggctggcctttgaactcctaggttcaagtgccaccgcccaccttggcctcccaaagtgctggaattacaggcatgagtcatcataccctgccaaataatttatttttaaccaaacttttaaagtattataaccattatagagttgctgttgtcttctgcttttaaaaggtaatggaggagaaactggaaattccgcctcttgaataattcctgttgcttcccataatcatatagaaaactctaaattgtgcctttaaagttttaggtttttaaaagaatacataaatttacttcagagtatcttatatttggaggaaatactccctatcctgttcaggctggtatgttccatccctgtctcagccagcacgttaactcccaaaatttcctaaatacaactttctcataattcaaagtctttgttaggtcttttctaagaggccttagcagaccgtctttccaaacattttcatgtatttacttcaaaacagttgataatctattgagtttgttttctgtcttatccctagtagatggtaaatcttcctcattttgtaatgtttaatacagttccaagtttatttggtggaatgtcaagattgttcctgtaaatttgtggccagtgaacagtggcacatatttgtatttatgcgtgtgtgcttacactctctgtagtgcagcacaatttttagttagtagcagaaaaacactaaccctgatgtacccaaaacttcgtgtttgagggaaaaaatttagatggctcagaactatgtcgcacatgtgatatagcaggagagcaagcgagatagagcgcgatgtagatatagcttcactttaatccgaggcatttgcaagttgctggacctagatgattctttatccagaggactcccataggggctggattaatttctaagactggggaatcccaacttactttggtagataattctaggaggcctttcaaagtgctgggggtgggggtgctgttcctacttcaaactaagccagtgttgcaactgcaccctgttcttcacaagtctttttggatcatctcagctgcagaaatcctctcttacctctctgatacactttttgttgtttttaagagacagcatcttgctgtgtcacccaggctggagtgcaatggtgcaatcatagctcatcatagtgtcgaaatcccaggctcaaacaatcctcccacctcagcctcctgagtagctaggactacaggtgcacaccaccacacccatctaattaaaaaaaaaaattgaggactgggcccagtggctcatgcctgtaatcctagcaccttgggaggccgaggcgggcagaccacttgaggtcaggagttcaagaccagcctggccaacatggtgaaaccctgtctctactaaaaacacaaaaaaaaattagccaggcatggtgacacacatctgtaatcccagctactcaggaggatgaggcacaagaatcacttgaacccaggaggcagaggttgcagtgagccgagattgtgccactgcactccagcctggacaagagagagagactccgtctcaataaataaataaaattttgtagcaagagtctatgttgcccaggttggtctcaaactcctggcctcaagcagtcctcccaccttggcctcccgaagtgctgagattataggcatgagctactgtgcctggcctggtacactatttatccagcataaattggggtattttaacataatctatgcagcctatcatcagttttttctacacaggtgatacagagaccagtggcagagttatgatgaacagtagcatccaagattcagaagcagcatattacttcaagcagcttacccaaaccacatatacaaaagagcagtcatgactccagtcagagaagaaaaaaaaaaatccagatttagatctagtcctacaataccctagactccatctccatctccagactctgcctctccctcagtactctcaggtcatgttcacctgtttgtcttctaggatgcctacaggactgcctgcttcaggttctttacatttgttctctctgctgaacacttatagcacaaatatccttagagagaccttccctgaccacccaaatacaaataatctccactccatttcccaagtcagtctctatcacattaccttatgttatttcttctactgcattatcactgtctaaaattcctatttacgaattgtctctctactaggatatcatacatggatgtgatacatgaggtcaggagacttcatctgtatttttttcagatgaatccccagtgtctagcatagtatctggatcataataaatgataaatttgtgaatggattgattcacctgaattatttcagcacaaactaaattgtagtaatcacacagttggtttttaataattcttcatatttaagaacaaaagaactaccctcatcttcaaagaaatcagacacaattttttttttgttttactaactcatttaggaattcttttcttttctggaaaataagcttatgctagactaattttcaaggctgaatatttttcttcaaatgaaataaatataaacacatttctatatacacagcatttttattaaatatactctgtgagaaaaagaacaccctaaagtgccagatttcatgtaaatccaataacttagtaaatacaatggtgaaaaaaaatcagagggaaacataatttaaataatcttataaaagagcaagaacatatcttaatcttaagaaaacaatcatcaaaatataaaagggaaagaaatctcttttgtagaagaatatatttcaaattccacctgttgatcatttcatttaaaaaattctattctaaacacatgggcagtctctcttaccaatatatatatttaaatcaatggtagaaagggaatttagactactcattcacactgagataaagtgacatttttgttgcacaacagtattgctcactggcactaacagtggaagatggagaaagtagatttctggattcaattgttagcagcagaaatggactaatgctaaaaatttagaaaaaaatagtccaagctgtagcgatttccaagtaatacaaacattaaccaaacattgccaatttgtaacgggctgtgaaaaacatatgaaaatactctacattgaatactagctttatgttactttctattaaagatattcagtgggcatattctaaattatatagggcttctatagagacctaaactagcaagtataatatgaagctaacaggacagtgtcagcatatcttgggatgttctagccaatgtttggctacaagtatttggaaggggtcaaataactatatgcacattcaaaatgaatacttataaaaagaaatcttaatgtatcagatatccacagactgaaaagtgttacacatgttgtggggggaaaatactgatggttggctgaatgaccaattaaacataccacttatgaaaagctgggtgattcaggtgcaaaaaaatatatatgcacacatatctctctaataacatcctaccaacatatatatgttgcatgacatagttaaagctgtgttaccaaactaggatgtgtaaagtatcaatgtagttaaaattaaattttaagtaaaaagctgctgctacttaaacaagagagtgaactttggggtttattcaagaattagttctcatatataaaaaagtttgatattaataaacaattctggtcaccataaggttttagacagtatagaaacttacagaaaagtgtttttggaccactttaaatagttggaggaagcaaataaaaggattaaactggattatgagtatgaatgcatttatgatcaaaattaacacaccaaaaaaatcaaaccacatttcacagcagaacctgcaaaaacgtttgtattcatcttttttgaaccataaaaaagaatgatttagtcttgtctaatacgacttttaagcaacaaaaataatttaatcatgaagtatcagcttgattatgaatatattctattatctgtatcagttggtaaattaactgtgttacccaaaaaggctgaccagctctaactagtatgaacaggatattgaattcattaatgaatatataactattttgagcatacaaataatctctggttttacacccactacatttcagaatcctgtaaactgtgaggcatacaatatgtttaatgtggcagaaaatcatatgaaatgattattttattctgttcagtccttttcccattaagcatgcaaacaccgtcataaccatctttggtttcacttctacgaggtcatcaggtaatgcatatatccgggcaccgatctttcgagcaactgaaatggcgtatcttgaagagacaagaaaaatatcttggtgttatccactgtgttttcacttaacatattttaacaaaagagtgaaatattttgacaagattagttttacgaaaaggttaagtttgtgagtcttaaatctaagactcacatataagttatatttaaaaatatgaattttaagggcatagtaacttttcctataaggattttagagaattaaagggccatgtattgtaatataaaccataaaggcttacttagcattgttcagcttgtcctcatcagataagttttctctcctgatcatttcttgacgaactgcatttggtgcaatggcatctattaaatctaggacaggtaaacttgtgcttatagatttatcctagaaaataaagcatagatgaacattcataaacatctgacctttaattttcattattttcagactcttctgatcatataactgaaggcaatctacaaattctttgtacttaacctaacgttcagcttttctgcaaccagcacacataaataaaccctttaaaatatacttttccttgaatctttatatataatatagagttgtcaccatatctgaataaggtttgtggacatgatagctcctaagtatgctaactatagtgtccattctgtaaaaaatacaaaacttttgaaagggaatagatgaatttttaattaacaattttataaattctactcacatatttcttagaccatgaatccaaaagccttcccttaatatttttcagaaagaaaaatgaaatagtgaaagggaactaacacttacaaagacattgtcttgttgttttacatgttttagtttatttaatccaccttttaaaccctagcatcttgatagtaaaggaattcttttttaaaaaaagatgaagaatataaagttaagatagctcaaatgacttgtttacacaaccagtaaatacagaacccatgacagtctgactctaaaatgcccaagagtctctccatttttaagttaccaccaaggcaagctaaaaatggacaactaaattatagtgaatagcgcactgcagatgaaatcagacatcctggtctgaactgatttttaccacttatcagtacttgaacaaattatttgttttctctctcagcttgaatagtggccaccactgcttgcctacccagaatctacacactctttacttctttcatacaagtagaacccatatttttgctctatatccatacctccttcacacagacatcagcttcaaggaaagctgacattcatagttccaggagtgaacctaaattaatctaggtcaagcattctcaataggggtagggtgataaccttgtttatgtataaagcatacagtgcataaacaggtatacagtgtatctctgcattaaaatttcatgggagagacaaaaacggaaaaaaaggtctaaaaatattccttagaggataattttcttttaagatttcaaaacactggtctaagccaaatagaggaatgctattctattaccacagtaatttaatttgggcctatgttatggaaagccagcaacccctcctcctggatgtgaatgagagaatgaaacctctgtcacaagcagcaactatcctatgaccaaaaggaaaaccagctttagggtgaagctggcacattagatggcaaagcagagatgggaaaaaaaaaaaaaaaaaagagtcctgaatgacattcttcaattattggttcaaccaatccagaagtctaccctacctctggattactgttattgtagtcaacacctttccttttggtttaaaccacttgaaattgggtttctgttacttgaagccagagcaccctttcctaatctctaaagtagaatgtcataggattcttaggaatactgaggtggtataggtgaaaacatctagtataggctctagccaaatgtcagttcttaatcaatatctaataaaacaatctgaagccatgtgaagaagagtaacagcttctttgagccacaatctatgagccacttcatttattaattttttttttttttttgacgcagagtctcgctctgttgcccaggctggcgtgcagtgttgccatcttggctcactgcaagctctgcctcccaggttcatgccattctcctgcctcagcctcctgagtagctgggactacaggcgccggccaccacacccggctgatatttttgtatttttagtagagatggggtttcgccgtgttagccaggatggttgtgatctcctgacctcgtgatccacccgcctcggcctcccaccgtggtgggattacaggcctgagccactgtgcccggcctcatttattaattttagaaaaatttatattcttatgttcatgttatgatacagatttttgggcaggaatgttcattttatgatacagatctttggccaggggtaatgttcattttatgatacagatctctgggcaggggtaagagagagagggtaaaaataattaggtcctttaagtctatctgatgctggtaatctggatctgctttttgtatcttttctgtttctgagaaatcagtctgcagaccacctacatgaaaatcatgtggggtatttgttaaaagtgcaaatctagccccactcaaactaatgtcaggttatctatgaatgaggctgggaatctacatttttaataagctttctagatgactctaaatgtgtactgtattatactttctaaaaacaatatttcattctagaatgcattttaatttctatgggcttacctttcatatatgtatatgattattttttaaaatacaagtgacttatttaattgtgctataatttgattccttatttacatatttgtgttattttaaatatttcatttagatttaggaaacaagtatttttcccacccattttcttatgagttaccttgcgtaaagcttctactgagtttaatgaagaatttaagtttctaaagattgtatcagatctcttatcttcttgtttccaagaaaatagccctgtcttccaaatcctctgatttgtacattatcagtgaaagacattttacttttgcaa

SEQ ID NO: 960 - DNA, 2194 bp, Homo Sapiens
gaaaatcctaaggaacattttatttttcaatttcatttatttcatttttgtttatactttagtatgcaaggaacattttaattttttcttattttttgagaggaaaattacatgctcattttattcatgtctctaaatgcaaaggcccaaacaaataaaaattaagaaattaaatccaagaaaataaaaagaaagaaatgcaacgaaaatttaacatttgaaaatatttttaattaactctattaatagagaaaaactattttacctttttaataggatcagaaaacacatttaatataatgtagtacctattcatgattactggaaaaaacaaacatataaacctcaatgtattaggttaacttccacatcctgttaaataatatgtagtgaaactggataggcaaacaaaaaacaaaaaatagaactctacagtaaacattatctttaacaaaattgggtcaatttcagaatgataccgtaagccttgaagctattcccagcaaaatggacttataatttccacttttgctcaggcttgtttgaaatatgtttccatcacttgcatcccaaataatgctcacaaaacacaagactccttagctattgccagtacattacaattaaatggaagatgtacattttctcccatgcaggttgtgtgactaactaaaaatgccaagtttattaggtgttgctggagtcatatcaacttagtgtatcaaccttgccttatttcagatgttctgagtgtcagttatatttgtatttcataaaaagaaagataaagccaaaatcattactgcctaagatgtgctgttttcttgctagacagaatcattcacaacctgagatcagtggggaaatacaatgcaatgagtcctgggtgctgaaaatgtcaactctttggatgtaattaaatggatctgtgagtgtagtatagacagaatctgagacagaatttgatcatttctcaagttccctcttttacagttttgaattgtaacttgcgtaccaagcgtgagcttgactatgaggtctcaaagttttgaaccttgtgttctgaattttctttagctttctaagtgaggatgtttcctgagccatatggaactacatagctccaccagggtcctcaaactatagacctctccccagagcctaggctatcaatttggctgttttgtcttctcccacacagtctgaggttttcttagtcaccaaagaattttttttggacgtatgacagaactaagtcctataaaaaggctttggtgttaccaagattatggaattcccttcttagtataattaataaaaacagtagtaatatataaaacaaatgtaagaaatccccctgccccccaccacaaattcttatttctcccatgctatttgaatgttttaaaaacattgggtattcaattctctcaaaaatattttgtgtttttgcttctcaggaagcctattttatggaccatctggcagtgaatgcagttaatccaggcaacacttccctattttctttttctttttcttttttttttttgagatggagtctcactctgtccccaggctggagtgcagtggtgcgatcttggctcactgcaacctccgcctcccagattcaggtgattctcctgcctcagcctcccgagtagctgggactgcaggtgcgtgccaccacacccggctaattttttgtatttttagtaaatacagggtttcacatgttggccaggatggtctcaatctcttgaccttgtgatttgcctgccttggcctcccaaagtgctgggattacaggcgtgagccactgctcctggcccacttctctattttcttttgttcctatctacctggaaaacactgaaaccaattcatgtaaaaatttggccaccagcctaaggtaccagctctacattcttatctgtggtgtttccatcatataagctttcctgcttattttcatcctcatgttgcaggaacaggactgtttgttccctgactctttccttccagaaacttttcacatggtgtctagatagaacatcaattgagtggttaaggaactattctacatccacatctatatcctctttactggatgttctcttcatcagttacctttccagagacctggctcttccatgggaagaggtttctacttatttttttcaagtgggggatgttg

SEQ ID NO: 961 - DNA, 3728 bp, Homo Sapiens
actccatcggtgcctttgggaagcgccgccttctctgttgtacccggccgtgggtcaggtcggcgcggctggcggtggagtctcggacaccgagccctggaccccgactctggaagcccccagccccactgggccgcggcagggcgcccaccctccacaatctcagttcccagccggggagtgaggggctgggcgggtctctccaccgctttggagacctcaggacttggatacgcttttgagtggtcccagtcgtcctgatccacgaaggcgtggagtggaagtcaggaccaggggtcgccccagtgacgcaggaagtcaagcccagatgcggtgaggcgtcgccagccttggacccagcagtgggcgctggtgacagtggcgacctcgccgatgagagggtcttgctctgctgctgacactggccttgagctgctggtctcaagcgatcctccagcctcagcctcctgagttgggattacaggcacaagccacagtgctcgactttttatttaatcttgttagaagacaagacagaaacatgtccgttgtgaaaacaaggaagctgcgggcagatcgattgaccccaggagttcaagaccattctgggcaacatagcaagactctatctctgaagacaaaaccagccaaccaaccaaccaaccaatcaaccaacaaaaaagatcaagcagaggtgctccagaggacgcagcaatagaattccggagcaatgtctgcttggcctcggtcttcattcccatggtggcccctgagttccgtggagctcacttctacatagttccatgtgtgacttcaacaaaataaaatgacgcatttattggttaaaaatcagagattaccatcagatatggaaaattgcttttacttggtaataacaatcttacgcactttttaccaaacccatcgcattaaataactagcgtttcaaattttgacactgcataataaaccctcatttgaaatgactggagaaatactcatcaaatctcatggaagaatgacagaattttctccagaatttatcggaaaggaaaagaggttggactgtcaggaaacgttttcagggtaacatacttactattttctagacagttactcagataacacttgtacgcagagggaaacacacccctgggctttgcaaacacttgtttcctgtgtgtcagactcgcctgcatcctgtttatcaaatggaacggatagttattgaaagcaaagaccagaacaacttacctcttgtcagtcacctgcttttctttacttgtcatacttttagcatttacaaagttttaaaaatgtgtttatcatttggtaattatttttaaactttatttgaaaatatagactgagttctgaacaaattatccttaaatttcttcctctagtagttacacttttcagtatcagtgaagttttatgacgcctctatttttcctacccacacagcatctcaagtttgtctttacagaataactggaagtcctagctttatcctctctctgcgtttctctctcacagccccctcctcttggactctgctcttcctctcagcaccgtaacctttttaatttccagataggttttgaaaacaccatctgttcccctcttaggatccctggggcagatgataggtgaaccccacatcccagacacatggccaccaaagatattcttgcttttttaatgtttatcaagttcctccgcagacaacagaaaaaagtgatccgctgccagcgacagggagacacacaactggtccttattctaaagacccgacccagcctggaatggggcccggcgaggagttcttgcgccggccgcggggactgggcggtaatgagccgctagtctcggaaggtggtgctgttgggtgtgaggggagatccggcttgcgctgaaacagcgagcggcgtgcaaggaggaagccgcgatttccaaggcggattcccttcgctgggacacaactcttgagaataagacttataaggactctgagagtttgaggcagaggcagaacggctctgggctgagtgatggggaggataccagcactcagcgcgggtggcgggcgcggggccgagcgcgcgcatccagggacgccttggggacgggacgcggagaaaagttgccgggcggagagaaagggtggcgctggaaaccaaatggctttcatcccctggagacaaagaggtgccttcttttgacaacagctgccagtgacacacacaccatacggcggggccggcgggggaggggagcccgggaggagagcgtctaaggcggggaccggcactgactttcaataatggggtggttgccatggtgacgggccaggcatctaaaggggcggctgaaagcacccattgttctggggcccggctgctcgggttgtgcctgttcctaagagacacctttagacacctccctccgtgcaggggcgagctgcggcccggggctgggagcgtctccgcgggagtttcacaccagggccccaggccgcagatcgcagcgccgccttggctgcacgcgcgctgcatacggagggcagcgccgcctcccacgcactatccgcccgaaatccgagcgcgacgcgcgcccgcctgggcccagacgcgcaggccgggacacgcagctccgcctgctccccgctgtcccggggagacttcgaataacaatgcggagcaggacccggtgactccacaaataactcgctgaggtctggggcgagggcactcgggaaaaccccgcagtcactttgcagtcgtgctggaaggaaaagcagaacggaatcacaggataaagaagattaaaagtaacagggcagcgttgcaatgttgcttgtaagagcaagcagctggaaacaacctaaaagcccgtccctgggggctgggtgaatgatatggggcgcatccctctgagggaacactaagctgccattaaagagtacagggcagctgtatttgctgagacgtggaaattttccggtgtattctaagtaataaagtgcagaagagtgtgagtagggctgtgtgtatgtggtatgtgtgtttgcatctctggaagtggttgcttcttaggatggtcactgtgggactaggagtggaggagagaaagaaaacttgcttttcaccgtactagaatcttctgcaccttttgaattttgccgtttatactatgtctttacctgtaaagaaaaaagaactttgaaataaagttgcatttgcttgaacactgtctaatgagatgtgccactctccataaagcatctgaactcatttttagtgctttaataaatattaatttttaaaatatatatgcacaaatgctattagcccacagatatgtaaaggtagtgacagtggcaagttagagatgaaaagatacacttctttcctgccttcctgtggtgccgagacggacggagccagctgtcattcaaggagcctgctgtataacccatctattattatatcacattaatcatagggatctcacattaaacaaacatgacattagggaaattttcctagttacaaaatggtatataatcagtgaaatggactattgaacaccaaatgtcatagattttttttttttttttgagacgagtcaagctctgttacccaggctgcagtgcagtggtgcgatctcggctcactgcaagctccgcctccctggttcaagtgattttgctgcctcagcctccg

SEQ ID NO: 962 - DNA, 1681 bp, Homo Sapiens
gaattagcataggtttcctccgcaactgatgcatcttctaaccaggctgggaacacaacacgcgcacacgcgcacacacacacgcacgcacccaccccacccggctgccggacgcaagcgtaagtcaaggacttgcatgctagaatcagacagaaaatccagaaaagccacgttatttaacagaaccctacaaggtcagctttgagtcaaagcaggtaacagtttccttcgatgttttcatggacatttttattcccaaatccgagttctcgccaattctctaaagttcaagcgcccctcctgctttgcagaccacatttctctcggccctcgcgagtgaggtcgccaaatactcgacgcctcaagagcgagccgaggaggcagaggccgaccaagccggcctctcggcagccccgcccggcgccccgcggagaacgcccgggtgcggctcgagggaagttgtgtcaagtcccacgcgcggcccgcggagaacccaggggcggcccgcgcgcgtcggcctagcggggagggctgctccgggacacggtgcggcggccgcgggcgagttggacgcgctggcagagccgggccgaaggcggcgggcgtctccgggcagccatgttcgcggcgcccgcccgcgcagcaggacggagccctgacagcaatgtttgctacggcctccctctgcagtcagcctaaagcaaggagctggaggtagatgaggcaaaggtaaaggagaccaaaacagtattttaaagaaaaaatcatttatcttcaaataggctccaaacctaagatggtgtatactgttagaggacaagaacctgcttctagccatctttgcgtctccaggacctgacttgtgaccattcaataagagtttgatagatggacagactaatgaatagatgaagatgattagaagccaaaatttctgaatcttcctagcacccagaacatggcttaacatcaaggaaatgctcactaaatactgtcataatggaatgaatggaaccgatgcctaattgaaaatcattaggctgtaaaccatttccatgttccaatttcttcgtttatagaacagaaatgatagtgtaaccacctgaaaatccttcacctagacttccaaaaccacacccacctcatcaatgaagtctgactctctagaaagaagcaaatgactgaaatcatggtcctgtgccttgaccaaaataccattcgtcagaacaaaagaagtaggtcagtgaaacggcattagtatatccttcaacaggcaaataagtgatagtgtagtttgcttttgaagtcgctgtgaaaagttttaggtgaacatcacctacaccacattaaaaatggaatcaagtcattttctttaagaaatggagtttgagatatgagaattcttttgggctttttctacttattggccaattatacacccagatatatttctgcaatatttcaaagattctagttctaatttgtataataaaaaaaattaacagccttttccagaccacatgtttccaacaagaccttcaaaggcctcgctcgctatataaaactggctttaaacaatttcctttcccaaagaaggaaataagatatttcggttttgtaaaagaggcaaaaccaggtacaggccacctttcctgctggagagctggcataagtgagtgga

SEQ ID NO: 963 - DNA, 3009 bp, Homo Sapiens
gaacccctactaactgtgagctcctgaggagtcaggcctgagtctgtgggtcatctagcacatccttaatagaatgattgcctggatgtgaccaccctcacccccaaccctcacacaccctgccagcatgcctcagaccttaccccagctcaagataagtctcagattgcaggatacctgctgcagggaacaaaggtgaatgattgtcttgtgagcctcctgttgactgattctgttttacatggctgcacagagcccttgtggttatttggggttggggtggtggcttctgtattagtcacttctgcatgaaccatttcactcaggatctgaggccacagttcctttcttagtcactgatacatctggcagacttgaaattaatcagacaaacattgttcatagttaacatatccttggaagtttctcagctataaggaagaggtcttggtggctagggaggcctttctctgtatcctgttctatccagtgagagcctagagggtgctgcccagccatattctggctagcctcagcggttctcctgaaaaaaaattggcatctgacaacctggatggtgactataggtagtcaaatccagctggctggtctcctgggggttagcttccatggagctgcaagtcccctgaaatgatactggcagtgttgggacagcgtgtccgaaggcctggttttttcagaactggtctcagcaaaatgtctcgccaacttctacagttcccataagtacatgataactgaaacacttctagagccccccagcaatgggcttgtgcttttagtagaatatgtgcttgcttccatttaggggtaagaaggtgggcccctcaccatatgctgcacagagaagagagacaccatcactcatttattcatttaacaagtgctttccaagccactactaggtgccaagcacttcctaggtcctggggatacagtggagactaagatggagccagttctttctcatagggatctcacagcttagtgagtgagaaagccaaagagtcaaaatacagagagggtctgaggggcccattttgagagccatcatagtggtgaggagtgtgagtgctagagtcaggctgatcaaatcccagcctgccattggctagccttgtgactttgagcaagttatcttacttcgtggaacctcaggtttctcatccataaaatggggaagttggatagggtattatgatgattgaaatgcatttatacatgtaaagcataagtactggctcagggtgagcactcaataaacggcagtttattaggcacttttattaggaagtgatacaccttgagcaaaaccccttagagtataaggcatagcattcttacatatttttaaaatttaaaataaaatttaaaacatcttgccctttataatcagtccgccacaaacaagagatggagaaatcacccttccttgttttgtatctatggggtgcaaacatttaatcctcccaactgtcaaaaaagtgagagtttcacagcctgttttacagcagaggaaactgatattcagagaggttaagtaaatttgcccaatgccacacatctaataaatggctgagctggaatcaaggccagctcttacttggctgcaaaatccatgttttatgcagctcctccactatcttggcctccaaggcagctggctttgaacactacccttgcagcccagtcagccaatcccttgctctcctgaagcttttgctggtgggccagccccacctgctttccttgtgcactctgacttggaccctgaagtgagaagagttggcacaggacatcttacttccctgaaaacagtacctggacttttctgtatcttcacatccattgggcattgggcaaatgggtcatgcagatgaaaaccatccaagataagagacatgggagtgaaattcacacccactctggctttcataccatgggtctgaacattagcccatggtgtttcttggccatactgacctgtgccatttcagctgcattcatctcagttggtgttgtctgctggctgctctttctgatttcccacaggagcagtaagaacctgaggaagagtagggtcagaggagtctgggagaatgaggaaatatgagagccccaggaactgaaaaggcctgtgagagactctgagcttcctgggaacaggcgcagtggctcaagcctgtaatcccatcacttcgggaggccgaggtgggcagatcacgaggtcaggagatcaagaccatcctggctaacacagtgaaaccccatctctactaaaaatacaaaaaaattagccaggcatggtggcgggtgcctgtattcccagctacttgggaggctgaggcaggagaatggcgcgaacccagggggcggagcttgcagtgagctgtaattgtgccactgcactccagcctgggcgacagagcgagactccgtctcaaaaaaaaaaaaaaaaaccacaacaacaacaacaaaaattccatgttgacaaggatgggaatatgagaacatggaaacagctatgaaaagacataagagaattaggaggattttctttaatatatcattttttaaaaaaaaacttgcttgtatttgtttattttttaaatagagacagggttttaccatgttgcccagactagtcttgaactcctgggctcaagcgatcttggcctccctaagtgctgggattacagtcatgagccactgtgccccgccattttttaataaacctttctaatggaacaagtaaaacacatgcagtggatgctcagcaggccttgagtgtgtgaatgaaaaatatttgaacttgtttttactggttgatttcattgcttaaaaaacataccttagctggacgcagtggcgtgcgcctgtagtcccagctactcatctcttaaaaaaaaagttttatgcttgttaatttcataaatgctagagggatcaccctaatcaaataaagctactcaaaaataaaatatgaaa

SEQ ID NO: 964 - DNA, 1991 bp, Homo Sapiens
tgaataatatgccaactttcctctttcctctataatcaacttcaatgaatatttctgtacatgtatccttgtgctcatgtcaaaaaaagcatttatgattatccttatgagtaaaattgctgcttctaagggtctaaacatcattatgaaatattgtaatattgctctccaaataaatcataccaatttattgtctaaacaccagtgtatgaccatcactacagctttacatcccccatcagatctggtattgttgggttatgttttgttttggtgaattcccaatatttttaattgggaatctcattcttgttttcatctgcatgaaattgtgaggttgagtatgttttcatttgttaaaattagatgttcatgtttcctctaatgtgaatcatctttttgcacactttagtaatttttgtatttgtttgctgtcaactttcttattaatttgtagaagtttctttttatgcaaccaaatcttttataagtttgtaggcattgtaaatatcttctctcaggatatggcttttaattcactttatttgtgaaataatatttttgttgtctagagaaattttaaatcatatcattttttcaaggtttgtattttttttcttttgttttgaaggtttatttttcatagataggtcattactccatttggaactttttaatatatgagtagatatctaattttattgtatacaaacagctaatcgctccaataacagcaaagagttcatcttttctactgatttgtattgctacttttgccagccatccacttttcatagatttatggatctgtttccaagcttactctcctattctgttgctcaatatttttgtataaacaattcccttcaaatattcctgacagcttatttcctcttgaatgttattctggtctggtccccttaaacagctgcaatttattgatggaacataaaacaggcaaaaggaaggagcaagacacagagttaatttaatatcctgataaaatagatcagcctttagtattttaacagctatatattatttatttagtaattttggttttgtttgtaaacaagcaagttatattgtggtaaagaagaaatatgggagtcaaaataagactttaaagatgtatctaattttgtaattaaaatacatttcctactcaacatttttttaattttatgtaaaatattttaggctacactgtgcatgttttaaaaccacttgattttaaagctttttaatagaagaaaaaagatacaaagctgaagttgtaagggtaagtgttaagtattgaagttttgtgggcctaacaaatgactggtttatataatttgtagaatacttttttattttacatacttacctaatataagtggtgcctaaataagtaatgctttataggacgaattgatgcaggtgggagagtcactgtgatatgagactgtcagaggcctttgaaccagagcaattctattgtgaataggggctggataaagtaagtctgagacctacagggctgcattcccaggaggttaggcattcttagtcaaaggaagacacaggaggtagctcaagacacaagtcacaaagaccttgatcataaaacaggtcgtggtaaagaagccagccaaaacccaccaaaaccaagatgtcaaggaaagtgatctctggccttcctcactgctcattatatgctaattataatgcattagcatactaaaagaccccaccagcaccatgacagtttacaaatgccatggaaatgtctggaagttaccctatgtgataaaaaaagggaaggaactctcagttctgggaattacccgcctctttcccaggaaactcatgaataatccaccccttgttgagatataattgataaataactataagcatactaagtcaagtagcccatgccactgctctatctatggagtagccattgttttattcctttactttcttaataaacttgctttcacttt

SEQ ID NO: 965 - DNA, 3864 bp, Homo Sapiens
taaactgtctccagataagaaagttctagagcaactatcctatatttttgaagaaaaaacaattctatctggggaagttttattcttcagaaagaaaaacttacggaatgggaaaatcaaccctatctaaatcaaccctgactagtcaacccaagtcaactctgagtatctctgaggtgaaagatgaagcatgctgatgggtgtcaaatccaatcttgtatgaataaaataagcatcggggaagcatagatgtcatcttctaaggcaaacattctgaggatctggcagcataaatccatcagttaatttataatataattggacaccactatggccaaagtaaaagacacggccaaatctggatcaccttacaattttcaagatgctttcaagatcccccttgtcctgttatggctgagggaagcagtgatgggagtaggcaccatagtctgtaacccctccccttctgtctcggtacagacaaagcagataagctggggctctggtaatcttacacagtttacttcatgccaatttttatgctccatgagatccaggtaaactgagaatgctgtgcatctcctacatctaactacatcatttctaaatacttagaaatattttaagttttaatacttagaagtattttaagttaccgtaaagactttgaaactgtgacacaggtaccctcccctctgatgtttttcctagtcatcctgggtctcaggtagccacatggcacccaagatgggtatgaagggcaggtcctgtctgagtcctgaatttacgcacagctgtagacctcatgacagaagacagaaatgggaagacattgcctggaggacggaaccctcccaaaatagccaggaggcaaagctagggcaggggaaaaggggatatattgggcttgattctgccttgcagctggtggcctaggcattgagaatgtgtcctcatgcctcactgtgggcatacatccagacctctgactccagaggctcaaaaccaaaaacaagcaagcaagtatcaaattatatttaactgataattttgaagccatttctattttagtaacaatttacaactacctttatttactaaatattacatacaagtaacacatatagacacagacacaaagacagaagcagatattatagcttacataaaggattgtcatttgctggcttttgaatagtttttcttttccccattcagactatcattcttccattacctgtttcattgccctaaggagttgttagctaggcaaccttaaatttgcatttctaatgggacaactcttaggtgaaataaggtagaaaatttatatctcaaaagcacaacctaagactttaggcgtacatattgtaccctcatttgctcaaaccaaggaaaaaatgatgtgagtaaaaaatttcagttaagatgtccagaaaagcaccttaaacaaaggtttgacttgttacataaatttaaaactatggtaaaagtttctaatatacacaggcagacacccttacaaatggagatttcctttatagatgtaaatttcttttacagaagagtttcaggatagccagttaaatgccaggaaggtatattttagttgggtaggtggtttatttgacttagctactgtttcttggctaaaattactgagttcagggtagatggagcccattgaggaatagggcaaagaaaacagtactctgtgcttggactcagactggatagatctaaaaaagaagcaagtctgctttacccactggtttacattttatcaacattttatccaggatatcgttattttcactcttgaggcaggatagtgtttatgccaaaagtttagcagatttaattattcttgtgaattattcacctgagctttttatttgccttttttttttttttttttaaagacagggtttccctctgtgtaatcacaaaggcacagtcacagctgatttgcagcctttacctcctgggctcaagtgaatttcccacctcagcctcctgagtagctggaactacaggtgtacaccaccacatccagctgatttttaattttttgtagagaggagatctcactatgttgcataggcttgtcttgaactgctgtgctcaagcgatcttcctgctttgatctcccaacgtgttgggattacaggcatgagccaccacacctggccctatttgccttttatgaagtcttttaataaagcaataaaaatattgaaatgtttttagaagcttctgcacatcaataggcatccttgaagactaattcaggacccctcatttttaagtgctgtgttgttcattaggaacggtccattgtaattttaagttacaaagattttgccatttctgtaagtagttatttcttctgaggcctaatatttatacattctaccttatagctagaaggtagaatacggtgttcttcagatactaaggatccaatatttccctagaatcctggatttggtcctcagatccccttcatcaatttagttaatgatttttccctacctaagggtacaagaaaaagaatgtagaacacaaaaatctctgcaaatttctgaagtctgcacccactgtaatattaccatttctgctagtttctgcctgatcctggacatctgcagcctcttaactgaatccaagtcagttaattatcagatccaatccaatcatggatccagtccagtttctgttgtgacttccaaacccagttcggatcagaagtttgctcaaactcggttccaaacagaaatctgtcgagcttcagaatctcagcgagaacttaccacgatatcagttgcttccagaaagcaatggacatcgtgagtctgaggggtaccttgcttggtcactccatgctcctgggcatgacatctgttgaaaaccttagacatattaaatttaacagagtttaactgagcaaagaatgattcacaaattgggtagcccaggaaccagaataggttcagagaggctctggtgcagtcccatgattgaagatttatggacacaaaaaggaaagtgatgtacagaaaacagagatgaggtacagaaacagccagatttgttacagttcgggcatttggagtatttgaacatagtttgaacagttggctgcctttgattgactgaaactcggtaattagcacaaaagtaggttacgatctgtttatacatctagttaagtttcagttcactgtgtacagagaaacctttaggccaaacttaaaatatgtaaggaggtggctttaggttagacttaatttaacagatgttatatatattggttttcatccactgttcctgtcttgtaactcccatagcccttgttaaagtctttttgttacaatgttgggtgtgtcaggtctcatgtgtctagacttaatttaacaaatgttacatatattggttttcatccattgttcctggcttgtaactcccatagcccttgttaaagtctttttgttacaatgttgggtgtgtcaggtctcatgggcaggcctcaggaaacagaatttctcagactttctcctatccatctctcatctgccccaagacaagaccctataatcttccctgcctttctgattgggagttataagaccctcctcagagggcgtcccaccctatccttggaggaaggaatgctgatattttgaaatttccataaaaacccaggaggactaggttccagaagcttcaggatggctcaacacgtggaggttcttggagggtggcctgcacaggaagggcatagaagccctgtgccccttcccccatacctcactctgtgcatctctttatctgtaatatcctttacaataaaccagtaaatgt

SEQ ID NO: 966 - DNA, 6098 bp, Homo Sapiens
cccagcccaggcaggaggtgcactggcctcccggcggccttttgaggcctaagagctccaagccctgcccttcgtgccctctgcactagacgcgtggccacagccgacagtggatacctcatggcgactcagagtcctctctttaacctctcagctaccttcttctcatgacgttttctcggtaaaataagtggtgtggctcccctctcctgaccgggctgtgtcccaggacagagccggctggaaacgccccgcttgactggagagcactgcccgggctgctgcaggtgcccctttcacaggagctggagcgcgcctcaatgcagagatggtgtggctgggagggacttccctttcccagtcctccacttacatcacagggcacaagagccattggaaaagcatttagagaaatcatagcgaaaattttccagatgtggcaaaagacatacagctgcagatttaaaaagttaagcaaacctcaagaatcgtaaacccaaagaagttcatgccaatcacatcataattaaacatcaaaaaaaaaaaaggcagaataaattttgaaagcagctggagagaaatcaaatgttgttcatgaggcaacaccaattcaagtcagctgagctttcacctgaaaccataggacgcagaagggagtgactggtttttaaagtactgagggaaaagaactgtcaactgtagattcaatatgtggcaaaattcctccaaggagtgaaaggaataagtacttagcaaacaaaggaaaactaagaaaatttgttgtatctttaaagagtacctaaaagaaattcgctaaaaggaaaggaaatcaacaacaacaaaaggacttggaactttagaaagaaaaggaaaacattaaagtagattttagaaattaggaaagatataataaatatccttcaattcatgagttgccaaattcatatttgatggttaaagcaaaagttatatgaccatctgatacagttctctttttatgtagtgaaaacacttaagctcactatacataaaaagtgggaagaataaaaagacctgaatgacagtaaggtaagatgaaagtagaaggaaggaaaaagatgtattaatgcagacattaattaaagtaggagtggctatattaatataaagtagacttcagatgaaagaaaattgcaagtcaaagagcaacattaaataatgtaaaaggatcaatccatgaggaagatgttgtgatcctaaatgtgtatgctgcagacaacagagccttaaaatatatgaagcaaaaacagagttgataggagagagaaacaattccacaattataggtgggaagtttaacatctgactctcagcagctaatagagctactagacaatcagcaagaatacagaagactgagcaaggccatcaacccacaggatgtaactgacatatagagaacactcccaccaacagcagcagagtacacattttccaagggccgtggaacattcaccaacccatattctgggtgattaagcgagcctcaagcagtttaaaataattgaaaccatacagagtgagctctttaaccgtaatgaaatcaaattagaaatcaataaaataaaaacaacagaaaatatccaaatacttgaaaattaaaagacttctaaatatttcatatatcaaagaggaagtctcaaaggaaattttaaaaatacatagaatgggaagaaaatgaaaatatctcaaaatatgtagggggaaaaaactagagctgtgaggaaatttttagcactaaaaacagaaaatgtctcaaatcaataacctaagtaattcaagtaactagaagaaaaaagagcaaaggaaggaaatcataaagataaaagcagaaattaatgattttttaaaaaaaatgaaaaggtaaccagcagcttaactccataatgcattttaaaactttttttccattttagtctcaagatgtaatcttgaagcaaactgcaacagccttttcccttaaccttaaaatagactgcatgttccttcctttcccactgtgtactcccttcacattcatctaattatgccagtatctaagtatgtgcttacttaggagttcaagggctaaccttgagacagatagaccgagcctagagaccgagcagaattccagagattacctcaaggcagctagtcaccaacccagccattgttcagatgatgtcagcccacactccaggtagacagagatccaagatagccagtgaaaaaggacacacacaccttgcactcaacacaactgcatgtgtcccatacgaagtttctctttataaaccctagccttctccctacaagttcaatgtgattcctttggatatgaatccagccacttccctactgctagtttttgttaatgaagtcactttccttttaccagacctcactcattcttaagacttcgcaagcagcaaacagctggacctgcattcatttacaaaaatagaaaaaaatgaatgaggcaaaacactgtctgtttgaaagaaaatcagtaaaatgcataaacctctagtaacactggccaaaaaaaaagacacataaaaattagaaatgaaaaaaaggaaatcactatgaatcctttggccattagaagaaaaataaaggatatgatgtataactttaaactcacacagtcaacaactgaaaagaaaagaaaaaagtccttgaaaacctaaaactaccaaacctcaatcaagataaaacagacaatctgggcagttctgtaatcttcaaagaaattgaatttgtaaataaaagtttccacaaaaagagatctccaagtctggatagttgtattgaagatttctaccataaatttaaagaagaattaacaccaattttacacattctcctacagaaatagaagaagcaaaacacttccctactaattttatgaggtcagtattacccttataacaagcctacaaaagacaatacaatgatttatatcactcatcaatttagaagcagatattctcaacaaaatattaacaaattgaatccagcaatgtatacaaagaattctacaccataaccaggtggggtttattccaggtatgtaaggctggttcaacatttgaaatcaatcaatgtaatccatcataagttaaatttaaaactttgcgtgatcttaacaattgacacacaaaaaaagcatttaccaagatctgtgataaaaataaaaaagaagggaactttcttggcttaataaagagcatctacaaaaaaccttcagctaatatacttagcattaaaggaatgcttgcttttcctttaagattgggaacaaagcaataatatccactgttatgactctattcatcatactactggaggaagttttagccactgcaataaaacaaggaaaataaataacatatacagatcaaaaaggaagaaataaaaccggacctgcttgtaggtagcatgattgtctacatagatatagatctatgtagaccaaaaaaaaaaaaaaatagaatcctagaactaataagcatgagggctttcttaaactcagatcaatgcataaaaatcaactttatttctgtataccgacaatgaatatgtagaaactaaaattaaacataacagtttacaattgttccaaagaaaatgaaatagggataagtctaacaaattgtatacagaatctgtatgctgaaaactttgaaatgccgatgaaatgaattttttaaagtcctaagtaaatagggaaacatactgtatttatgagttggatgactcaacatagaaaagttgtccattcttcccaaattgatctacagatataatccaattcctacaaaaatcccagcaagggattttgtagacatagaacaccttatcccaaaatgtatctggaaagcaccaggccctagaatagctaaaaaaaaaaaaaaaaaaaaaaaaaaaaaaaaaaaatctgtactaagaacagaatgggaggaattattctacgtggtattagatttgctatgtaatcatagcaatcaagacactgtggcattgaaaatgcaatagacatattgataaatggaacaaaacagagaacccagaaatagacctacacaaatatgcccaactgagttttttataaagatacaaaagcaattcaatggaagaaggaaaatcttttcaacaaacagtgctggaggaatttaacatcgataggcacaataatgaacacaacctaagtctcacagctcataaaaaattaatcaaaatagatacaaacataaatgtgagacataaactttaaaacttttagaaaaaaatagaaagaatcttcaggatctaagatttcttaaactttacaccaaaagcatgatccataaaaggaaaaactaataaatttaacgttatcaaaattaaaaaattttacttagtgaaagatcccattaaaagaatgaaaagacaagctatagactggggaaaatgtttgcaaatgccactaccaatgaagaattagtatctagaattaagaaaaaaaaactcttaaaatttaatagtaaaaaaatccggtaacatgagcaaaagacatgcacagaaatttcgctgaagaggagatacagctgtggaaaataaacacatgaaaagatgttcagcaccactagctattagggaagtgcaaattaaaatcataatgagatatcactacacatcagtcaaaatggctaaaattttaaagatagtgacaccaccaaatgcaggcatgaatatgaagaatacagatcatttatatatcactggtggaactatgaaatggtacagccaggttggaaaacagtttggcactctcttagaaaattatgtatgcaattactgtacaacttagcaatatcactctttagtatttattccaaagacagaaaaacccatatcaaaaaaaaatctgtacacgaatgttcacagcagctttatttgtaatagacaaagactggaatcagttcaggtatccttcaacagatggaaaattaaaaatatgattcatcctttccttggaaaactagtcggcaacggaaaagaacaaagtgttgatagacacaacttagataaatacctagggaattatgctaattttttaagaaagccaatttcggctgggcatggtggttcatgcctgtaatctcagcactttgggaggctgaggtaggcagatcacgaggtcaagagttcaagaacagcctgaccaagatggtgaaaccccatctctactaaaaacacataattagcagagcatgatggcgcacgcctgtagtcccagctactcgggaggcagaggcaggagaatcacttgaatccgggaggcagaggctgcagtgagcccagattgtgcccttgcactccagcctgggagacagagcaagatttgtctcaaaaaaaaagaggaagccaatttcaaaagattccatattgtttcctgtatataagatttttgaaaggatgaaacattaaatattgagaaatgattggatggtttctaagaattatggatgatgagtggagtgagcaatgagggagaggaaaggggaagaaaggaagggatgatgaatgtgcttataagagtgcaacccggggtgggcgtggtggttcacgcctgtaatctcagcactttgggaggccagggcaggcagatcacctgaggtcaggagttcgagaccagcccggccaacatggtgaaactccatctctactaaaaacacaaaaattagccaagcgtggtagcacacacttgcgatcctaactactcagaaggctgaggcagaaggattgcttgaacccaggaagcagaggttgcagtgagcctaggtcatgccactgtattccagcctaagcgatagagtgagacaccatcttaaaaaaaacatatatatatgtatatatgtagaagagagagagagagagagaacaacacaggatccttgtgatgatgagtggtggaactgtcctattatctttacttcagtgaagtaaatatacatgagcaggtatatctatacatgaatctacacgtgtgataaattttatagaaccaaatacacaaaaaatgaatgcaa

SEQ ID NO: 967 - DNA, 10941 bp, Homo Sapiens
aatcaagtagccggcttgccttgcggaggatcctgcttccccctcctccaccccatttttttcctttcacccagtaaaaccctgtttaactcacccttcaaaccgtctgcgaggctacgttttcgtggccacgggacggacaaggaccccatctttagctgaactacggaaaagccctgcaacaccaccatctcatcgctgacttggaaataagctagcagtggctgtgtcagcaagaccaccacatgcagcaagggtggccacttccagctagctcctgcatccacagctgcctcgcccctattggctactgccatccatgtaacagactcttgggaaatatgctcggctgaaaaactgcatttcccaactcaagacctaagaggtggtcaggagatacaagcaggagtccttggatgaggtaatgagaaaagtcatcatgctctagtccttcctctttcttgcctcttgcaaatggaatgactggaacacagcagccatcttgagatgctgagaatggaaaccacacattaaaaatagaaagagggccaggcatggtgactcacacctgtagtcccagcactttgggaggctgaggcaggcggatcccttgagcctagaagtttgagaccagcctgggaaacatgggagatctcatctctactacaaatacaaatacaaaaaaaaaaaaaaaaattagctgggtttggcggcatgtacctgtatagtcccagctactcgggaggctgaagtaggagaatcacctgagccggggaggtcaaggttgcagtgagctgtgattgcaccactgcactccagcctgggtgacaggagtcagaacttgtcaaaaaaaaaaaaaaaaaaaaaaaaaaagatggaagggcctgggttcctgttgacatcagggagccaccttaccgggcctgggttgcttttctccagatatttttatttttaatgagagaaggaaataaactttttctttttgaactgcttatttgactgtagctgtaaatacaaagctctagaatctctgtggtaatgacttttaaaagccatcaagtataagccctgcaccatgtcaatgagagataaagggaagcaacaagaaagggaaaggagagggaaagagaacgaaacagagacagtgcttgatccagggccagaccacctgagtttggaccctagtctatcacctccctactaactgaccctgggcaaactacctaagcttcacagcaccctcggttctctaacctacaacatggggatgccaatggcagtgacctcagtgtatggtgagagttccatctgttaccatgtgtctgtctcgcggtaaacattcaacggcagtcaggtgctctcccgctttgaggctgcctggcagcaggctcctgtctcctagggttgaccgttttctttggagtagactttcactctatcggaaagctgttcctcgggatgaataaacactgcattcccatcacttttggggcctgtctagatctgtttcccagagccatcatgtgcaagactaatttcgctctccatatgaaaagtcttcaagtatttgaagactggctggccatcctgcacaccctgaatcttcactcctctggctgcgcatctggagtgacggagcccctccctcgctgtgcttcagcttgttccttcccttcttcagtgggactccaaggaacgaaggtcatattgcaagtacacttctgtttttgtggccatcctctgatacaaccatgttcggcaggagtcacttggcaactttcagctggtggatggactgatctggaggatctgagattgtttcactcacatgcccagtgccttgcaaggctggctgaagggctgggatcagtggggcctgggaggcagagagctcacctacagcgtctccagcgtggcaaccccagggcatcagaacttctcacgtggcacctcaggactccaggagcgactgctgccacaatccaggaggcactgtatggcctctgtgacttggcctcagaagtcacaccatgtcacaacctttgcactttgttggccgaggcagtcacaaggctgcccagattcaaggagaggagacatagactctacctcttagatggaagaggcatcaaagaatttgcagccatttttaaaacagccagttttctttgactgcatgcttttattttcccctgtaatcattctcagagtgagatctctatatagtaggtgctgtcaaatgacacgggggagtgtctttctcaggtctcttactgggaggtacagcactggtgtagatgggtctttcctccctgctgtgtgtagaaggctgtcacctgggctgcaccattctggatgccacactattactgacccagtctaagacatgattaacccctttggagacaatgtaacattgccgacccacatcaagctcactgtatactacagtctcagctcttcttcttgcttgcttggaagtacctgccctacctgtcagctgctagtgacccccgacccatgaacagtccataccacagtcttctcatgctcaacaccaagctcatttgatttcagttggtacatttttgttcttcctctttatgaggttcctcaaatccaggcctggggaaggcatctctctgctgctccatgaccgtccatgagtcatggagagtggccctgtgatctcagaggggttttcaaaaccagagtgtgtttgccaacaaaaatgatcaacattgattggagggctggagaaggagttatagagtctggaaagtgagccagctaaatcttcatcttcgaaaatggagaggttgtagataatgtctgaagttgacagagcaaggaaggacattctataaacatattactgtatttggagttatgcaggtagccactgaaaaactaagaacagaaatgcttcaaactggttgcctctggaaagagagctgggaggaagagtgggctgggagagaccagctctcctcatgcttagccgtgcagtgcaatgtagtattttaccttgtgcatggattttgtaataagaaatagcgatgtgcatttggatattaaaaacattacacaacaatttagagtgaggcgtgccatttaaaaggtctgattagaggttgcggtttgtcattacattttatagagggttgtcttcttgctttgggtttaagctctgttttcattattttaatttgttttttagaaaatcacaaaattgggacaaaaccaggagagagttgaagacaatgggggaagggggagaaaagctccccagtgaattcagctgccctttctgtaccactctatgtactttgattttatgtccttctggaaaaattaaattggaactccctttatcacttcttcatttcattttttttccgttgtaaaaagggcaagagcttaatgtgccacagagtaaagctgcaggggcagctgggcacacatgggcagatgcccgaggctctgggcagctggctgggtcttccactcagtttccaaagtacgcagtcgtggcagcagctggaacctggcaggcaggtgacaggaagacaagctaagggggtgcatatggcatttctgtcgggtttaatgttttaacaagtcagaggaatacttaaatatcaaaacgaagtatccctgcagtaaatatttatcctttaaccataaaaatatccttttataccctttgagaattgagaggagaggagaggagaggagaggaggggaggggaggggaggggaggggagaagaatggagaggaggggaggggatagaagaggggaggggaggggagtggaggggaggaaaggggagaggaggggaggggagtggaggggaggaaaggggagaggaggggaggggagtggaggggaggaaaggggagaggagggaaggggagaggaatggagaggagaggaggggaggggaggggaggggaggggaggggaggagagagattcttcagaggttgatccaagctactgaaagggttgttcattcactggcagcactggcctcacccgggagcttgttagaaatgtaacatcttcctgttcccctaagtggcctgacaatctgtggaaatgtgaactcaggcaaatcgagaggttcaaatcttcgtgttcattgaagaacacctgtgaaactgctcaggccgtcagggtatgcatatatcaagagccacccagtatctgaaagatgtcacttgacagagacagtgtgtaccattctgacgttacaaaggtggagttggtaggtgcgtccaggccaaacagtgggactggacacagggtcagtggcccaaaaagagtgctgaatgtttgctgcacatgcttaaaaatgcagagtcatgctgaacgtaagggtttacatgtagattctctggtcattgagcatagccaggtgaacaaagtacccaagatgtgtggccagactcacagagctcagggtcaggttaacccatgtgtgagctctgcctgccacagtgagatgagccttattgaaaaggaacaaattgttcctaaaccagaagaggctgcgcagaagaaaaagatagcccagaagaaactgaagaaatggaaacttacggcacaggaatagactcatccaacaataaatggaattaaaagtacaggaaggaaggaaggaaagaaagaaggaaggaaggaaggacagaaagaaggaaggaagaaaggacggaaggaaggaaggaaaaaagaaggaaggaagaaaaggaaagaaaagaaaagaaaagaaaatgtagcatctcaggctccccatcccatggcctcctgctcctaatctgcattttaacaagaagctcaggggattcatgtgcacagcagtttgagaggtgctattctaaggtatagatgaggaattcttagtcaagaaagtgcaagcttgtggttctcagctttagcttagaagcatgtggggcacctgaaaaatactgatgactgggtcccaccctagaataattaaaacaacctctgggggcggagcctaggcatggatgtgttttcaaagcacccaggtcatctcaatgtgcggccaaggcagaaaatatagggtaagtgatgcttagagctgctgagcacattctgtggcaacacccaggtggagaccctgtctccttcatgcgctgcctcctctgcgcttggcgacgtgaaggaaaactgtcatacacaggctcgcatcgaatcccacaactattcacaagatggtctaagtggggtgtctaatcttttggcttccctgagccacactgaaacaagaagaatcatcttggaccacacataaaatatacaaacactaaagatagctgataagctgaagaaaaaaaactgcaaaaaaaaaagtcataatgttttaagaaagtttacaaatttgtgttgagccacattcaaagccaccttgggcccatgggccatgggtttcacaaacttggtctaagacttcatccttgagttagagtaagcctcttgtcactggagaaataccttactgctgtaaactacatgaaacactcatgcatattacaaagtggaatattaaaatctgctgccctaagacattgaacagcttcagtgttatccagcaatgctttactcaaatgtggatggagagtttaactaaaaggaaagcatggacactgggaaaccaatcaatcagatttcctattttcataactgagagacaaaataaaataagggtcgacagaaggtgcacgtgtttgcaatacttttgcgagagcccattgccacagccaaatgttagcctcttgaggcataaattaatttaccacaaatgcatgcctggttgcgtctggattctgctagggcgagcagtatgtgttagacttttggacaacagcttaaagaatgacatttctccaacttgctgtgatttttatcctcgagcagaatgtttttcttggaatgggtttctgggagggtttgcggacataattctggttatgtgtgcgggccctgaagggtgcttttatgaatttagagcagcagctgtccaggcagagggatgctctttacccagagtgtgtgtgccccagtaaacatatgaatggctttcatggagctctccagacacgtggcttgcgccccctgtgcccggccttacctggtactgctgcccggtgcagaggatgaggtggtcgtagggcacgatctcgtccgtggaaagcacaacgtgcttggctgctcggtctatgccggtcattctacccaccacgacattaacccaggagcacagtgacatcagtgcataatctttatcattaaaacagtggctgcaaagagagaagctccgtaagtgacatctgagcagctgacagcgggcattaattagacatctggtgagctggttcaagtcccctagtgggctgagtccgtgctcttgctgtgagtttaccaggactgatactaggagatttttcgttatgaaacacttagttacaaattgacatcttcccattaaagctaaattgttccacctggcttaggtcagcccacaactgggagggtgggaggggtgtgtgtgtgtgtgtgtgtttatctgtatgtgtgtgtgtgtgaaatcactcatactatacctttcttctgcttctacttcagagtggttgtaaatttactttagctgttaaattggtgtattgaccacagcctcaatgggaatgagaaggaagaaagtgacattgttgaggattcccaaagccaggggtcagaatctttgaataccgagaacccttcctattcgctaatacttttcagtaatcactcattctgagaattagcgtatggcttcctgccaaaacaacaaaacccattttacttcaagaatatagcaattagggagttaggttcgcagcaagtacactccctggagactttgggattcacccttcagggcagaggtgattttctaggaacggagacttcgaccgccagcaggcccagggcggccattcatgccatggcttcagcgtgctgtggctgcactggcttccattttctgggctctcttggagtttgagcgctttcacgtagtatgataagagtgggtttcttgtggctttgggtttatttaaacagttttgtgagggttgtttccagaattttctgaaaggattgacctcaggtaaaccaccttttagtgattctgttctgaatactgagagtctaaggtaataggacattaagtgcttcttttaatttaggctgtatgattcttttcttccttttttctcttaacataaaaacactaacatttttatttattcatctatttattatttatttttagaaacaggatctcactatgttgcccaagctggtctcaaactcctgagctcaagtgatcctcctgcctcagcctcctgagtagctgggactggaggcacgcgccacttctatgcttggcagcacagtcctcttcaaaaagaaccctgccatggtctgtgctgctgacaagcctggactctgcatcctcctgctgtcttcagtttcctcacctcttaacacagggtggaactgaagcaagtaatttgcgaagaccattgatatagtttggctctgtgtccccactcaaatctcatcgtgtagctcccataattcccacgtgttgtgggagggacctggtgagaggtaaccgaatcatgggaacaggtctttcctatgctgttctcatgatagtgagtaagtctcaccagatctgatggttttaaaaataggagtttccctgcacaagctctctctttgcctgctgccatccatataagacgtgacttgttcctctttgccttccaccatgattgtgaggcctccccagccacgtggaactgaaagtccattaaacgtctttcttttgtaaattgcccagtcttgggtatgcttatgtttatcagcagcatgagaatggactaatacagtaaattggtaccagtagagtggggcgctgctgaaaagatacccaaaaatgcagaagcgactttggaactgggtaacaggcagaggttggaacagtttggagggctcagaagaagatgagaaaatgtgggaaagtttggaactccctagagacttgttgaatggctttggccaaaatgctgatagcgatatggacaataaagtccaggctgaggtggtctcagatggaaatgaggaacttgttgggaactggagtaaaggtggcacttgttatgttttagcaaagagattggtggcattttgcccctgccctagagatttgtggaactttgaacttgagagagataatttagggtatctggcagaagaaatttctaagcagcaaagcattcaagaggtgatgtgtgtgctgttaaaggcattcagttttataagggaagcagagcataaaagtttggaaaatttgcagcttgacaatgcaatagaaaagaaaatcccattttctgaggagaagttcaagccagctgcagaaatgtgcataagtaacaaggagccgaatgttaatccccaagacaatggaaaaaatgtctccagggcatgtcagagacagcagcccctcccatcataggcctggaggcccaggaggaaaaagtggttttgtgggttgagcccagggtccccatgctgggtgcagtgtagggacttggtgccctgcattccagacactccagccatggctgaaagaggctaatgtagagctcaggctatggcttcagtggatacaagcctcaaaccttggcagcctccatgtggtgttgaacctgtgagtacacagaagtcaagaattgaggtttgagaacctccacttagatgtcggaggatgtatggatatgcctggatgtccaggcagaagtttgccgcaggggcagggctctcatggaaaacttctgctagggcagtgtggaagggaaatgtggagtcagggcgcccacacagagtccctactggggcacttctagtggagctgtgagaagagggccaccctcctccagaccccagaatggtagatctaccagcagcttgcactgtatgtctggaaaagccacagtcactcaatgccagcccatgaaaacagccaggagggaggctgtaccctgcaaagccacaggggtggagctgcccaagaccataggaacccacctcttgcatcagcatgacctggatatgagacatggagccaaaggagatcattttgaagctttaggatttgactgccccactggatttcggacttgcatggagcctgtaacccctttgttttggccaatttctccaatttggaatggctgtatttacccaatgcctgtacccccactgtatctaggaggtagctaacttgcttttgattttacatggtcataggcagaagggacttgccctgtctcagatgagactttaggctgtggacttttgagttaatgctataatgatttaagactttggggggccaggcatggtggctcatacctgtaatcccagcactttgggaggccgaggcaggtggatcacgtgaggtcaggagtttgagaccagcctgaccaacatggtgaaaccctgtctccactaaaaatacaaaattagccaggtgtggtggcacatgcctgtaatcccagctacttggcaggctgaggcagaagaatcacttgaactggggaggtggaggttgcagtgagtcaagatcacaccattgcactccagcctgggcaacaagagtgaaactccatctcaaaaaaaagaaaaaaaaaaagacttgggggactgttgagaaggcatgatgggttttgaaatgtgaaggcataagatttgggaggggccaggggcagaatgatatggtttggctctgtgtctccacccaaatctcatcttgtagctcccataattcccatgtgttgtgggagggacctgttgggaggtaattgaatcatgggagcaggtctttcccatgctgttcttgtgatagtgaattagtctcacgagatctgatggttttaaaaataggaatttccctgcacgagctctctctttgcctgctgccgtccatgtaagacatgagttgttcctccttgccttccaccatgattgtgaggcctccccagccatgtggaactgtaagtccattaaacctctttcttttgtaaatggcccagtctcaggtatgtctttatcagcagcgtgagaacagactaatacaaccatatagctagtaagtctggaggcagggtttgaacccaggatgcctggctccagcatcctctcaccttacctctgcctgtactgtcctgtagatctcaaattgttcagagggatccaaaggtcatctaattcccattggctgacattagctttattacattcagatacacacagttactcaaatcaggataccaaaaagtgtcatctgcgaggaaattctagaggattcctttttaagagcaaaactgctttatatttgcatcaggctttccagagcccaaggcacattcataggcattcacatagagattaatcttctacacaatttatgctagggatagggaagagaccggtttttctgatccacatttcataggtaagaaaatcaaggttggaaatggtaagtaatttgttcaaggttacaaagctcataagcagtgccagctatgaaagaaagccaggcctgctggccctaggcagcgccctgctccaggcacccacaatactccctctaactagtcctacaggtaaagtgcacctaagtagagacttctgaagaactcacatgctcaaggctcactccgtgtttgcccatcaggatttaagatgctcttgctgcaaatccaccccctggttaaagtcagtaaaatttcatgggtgagctgatcttttcatagggttcatgctgatgagatttttttttctaaaatctcttcttag

SEQ ID NO: 968 - DNA, 1477 bp, Homo Sapiens
aagaatttttttttctttaaatatcattcatcaaagacacatttaatcctgttagttctgcatgcgatttaaaaaaattgttctggtaatactctgttcaacactacaagtaattctgcatcaagagaaagctccaaatattctaacaaccattcagcatttccaatgatcttagatccacgcttggtgcgaaaactgaaaacgagagaaaggaaacgctgtggccaggtccatctgatactgtgaaatatttcttatcttgattttctcctggataagatcctggagcttggtgagaagtgtaatgtgtaggggttctaaaagccagaggccttgctaaatttagatttggttcttgcttatgtaattttccctgtgttttcaattatttatacaaatatattatttatatatgtctggaacttgtgcttttagcactcaataagcaggaataatttataggattacggagtgcttcctgtccttacctttcagagtatgttcttttgcattgttaattaattgttatatttcagccttcctttcccagcagtcttgtggtggtgcttaactagtcagagagataggatctatatttatcatcatatgcatgttccaaaatccaggttaattattttattagccattcctctagcctagctacccattgcggggagggggctgcgtgtcggtggcatgacccaacaggtcatgttccttaagtacagtgagagcctgctgaaagaggaagccagcttccaggcctaaatggaagttgcctgtgcttcaggtttcttttttgcctccactttccaaaaacaatctagttcttgacctatccttttctccaccctccctcaacaccttttttcctctgctgccttgcactggcctcaggcacctacccaggctcctgaccatgggtctggatttgggctactgctagagacgctgcctgatttttgcccttgtctctctacagtgctcccttccagttgttccccacgtctggccctccttttccttggttctcaccttgtcttggatttcagagattcaggccctgcaacacacaggactggatgacagctgctcagagtcaacctggcacataccccagagtggtgcttgcatgtaaggaggcctaggcactctgggaatcgaaggcctgaaagtggctccactggctgagggctgggcaaggtagcagcgcaacatctacttctgcctttttctccacagtctcctcagtattccctggagcaaatggagagaggtgttggttgtttccccctgaggctggagtatattgctgtctaatcataggtttcagaagagtaaatatagtgagatacataaactttccctctgtgaaaaggaggacagagatttacaaactgaggtgtgttttttggctactgtcatttaaaggcatgaggctggctgggtgcggtgcctcatgccagtaatcccagca

SEQ ID NO: 969 - DNA, 1799 bp, Homo Sapiens
ccctggtgggctttgaacacctgagctcaaacgatgccttgacctctcaaagtgctgggattacaagtgtcagccactgcacctggccgacattttttatttgtttagagacaaggattccctgtaaagctgcaggggcacaatcgtggctctcactgcagcctcgaattcctgggctcagtgatcctcttgtcccagccacctgagtagctaggactacaggtgcaccccaccatgcctcctattttttgtgtttgtgtggagatgaagtgtgttgtctaggctggtctcaagtgatccttcagcctcagcctcctaaactgctgagattacaggcataagcttttttgataaaggaaaaactagtgagcatttcacattgtagaatccaaaaacatgaaagttaatcttttcctgtcaatttacagttttgtaaatgtacccaggtgaagagactggtctgttactgtagatagaaaagtaccaaaacaaagttttactttgttcagtatactgtcgaggcaactttctaaatgagagggtccaggttcttggttaaagaaggaacttagaattaacaaaatagtgacaaacatttgcggcagcgcgcctcagggcaccagctgcaggggtctgcccacagaccctgaccctgcgacagatgaataaagtacactgacacacagatagtctgttttgccagtccagctgagggtgtcccactgcttacagactccctggagagttctgaaaacagttgcaactaggcctcagtcagctagtgagacttgcatttattcaaaaagattaaggatggcttgagtcaacaccattagagggtaattgatattgtggacttcccaagtaaaaagcacttaaccccccgtggtacatccaagattagtcttaagatcatatgactaaacaaactaggtaaactactctgccttcctttattactactttaatttgtttaaaagtaaagatcaggttgccttcaaccatatctatcaccgaagctatgcaaacttctcggccttccaagaattgtatctgtctctgtaacaatctttaatgtttttcccaccagcctgattgaatcccaacacatattcagaacttaaggctagaacaagatgaggaagatatgacagcccgtgattttaagcaatctaaggaaacccatgcttgcaaagaattcaaatgacgtgagagctactaagataaaatgtggccatgcaccaagccttgacggcaatatttaatctcataacaattcttctttcctcctatataagaagcatggcagcgacactgtgcataaattaaggcaaactgttgttatgtgaaaatgttaatgaggtagattcctttggaatcattagtgtgaagagctggtttttgttttcccattgcctaggccctgactttagtagtgactgatgcagcttttctagtctaacaaccctctcccccaagtaattctttgatgccctgcccttcagcttcatcttttaccacttactattgggttttgccaccatttattttatcattcacttatctgttcctcttcctaagttacaaacgtttctgaagcaaaagaaaatgtatcactgtagagagtctaggacctttagtgttatttggtcgtttacttttcatacactgcagcttttactgttttgaaccttcattgctatagtaggtattgaaaaatactgaacgaccagaagtgatttgatttctcccttatctggtaaataattttttttttttttgagatggagttttgctct

SEQ ID NO: 970 - DNA, 2015 bp, Homo Sapiens
gatgtcccggcctttccttgaaccagtagaccctaatgatgcaccagattattatggtgttattaaggaacctatggattgacctttgtaaagaagaaaaacatgttagaagaaaaatggaaaagaactctgcatgccctcagctcagatgccatctcctctgggagctcctctggcccctgccaaggctggatcagatgccctcagggcacacacgatgctgatccagggccatctgtggcccagactctgggtccctcatgcagccctcaccactgctcaggaggccacaggaacagaggaatcactggcccattttacagacgggaaagctggacccggagaagtgaagcaactttcctgactcacagtgggtgagggcctcccacactctttcccctgccccatgctgtttccaagggacttccacaggcacaggaagcaggctgagtgcatagcaggagtacagcgctgctgcccagggatggagcaggagggccagggagagagagacaggggtgcccctggtgcccacagagacaggtctgtaaagcccatgaacaaactctcagcagggcggggacgggtgaatggggctggggcccacaacccataccacaggcacctggtctacacaggtctgtaggcctgtgcagatacctggctccttgaccaaggagggtgataaggccccacctgaccccagagatttcgccacctggttaggtgggcaggaggatagtctctctggagctctgggtcatggactctcagaggtagggagtgagtcagcatggccaaaaggtggagacccagtcacccacggatgcttgggatgggcgagcctcctggggcgaagccttctagggtctagggtcccacatggtggtccccggagggctttctgttcttccaggccctgcagaggagaccaaggctcagctggcagctgtggggccagattctcctctttgcctaggggagagcccccgcagcaccccttgagagcccctggggacctgcctggggcacaccctggcccccaggaagcccggctctgggagcactgcagccaggatggaggaggcagtcttcagagaggcactgtctaggccagccctgtggggagggaaggccagatgggggaacctggaggggcttgtgaactggttcctgaccctagaaacccagcagaggtggactcgaagcccattctggggagaaggcaccggcaggcttctccgcctgaggtctgccctcctgagggtgccaggagagcacagccctgggaagactgtagcctgggctgtgacctgaggactaggaagcgtttatgacagacatggagaggcctaagtccctgctgaagcccagcatcacatcccattcctgagcaccaaaggccccaggccctgggtaagagaagcttcctaaagggcatcctgagggccccgccctgatcacctcttctttggagaatttcaggagggaggctggcatgggccagacaactggctggacagggaagaggtgggaatatctggacctcgcctgcctctcgccacactccccgcttccctcctcactgtagccaaagttctccctgtgctttccaccgacagttcatggcctgtgcgtgctattccttctgtctggaacgcccttttcccctttgcttcccctttctaattcgtcatttttcaggtctcaccttagaagtcacttcctccaggaagtccttcctgccttgtcctcctctgatctgggctggatgtaagcctctgtgcttccaggacgtcctgcctctcaccctcacccccggatggagttgctggttttcccacctgtctccctctcaccctcacccccggatggagttgctggcattcccacctatctcccctctcaccctcacccccggatggagttgctggcattcccacctatctcccctctcaccctcacccccggatggagttgctggctttccaacctatctccctctcaccctcacc

SEQ ID NO: 971 - DNA, 3184 bp, Homo Sapiens
gagcgcaggcgtactgttgccaaacgctgtgttcgactgtcttcccgcgtggggcctcgccttctgaatcttcttaccctcggcttcctacccggttgctcactgttttcccccaactgggtgtgcgggtgtctgcgcccgcgccgcccaccgtggggtactcctggcatttcgcttccagagtgctggcgcccacaagagccggacgttaattcaggcctttaactttcactctgtacctccccacaaccagacgagggagatgcatctgggggtggaagattgtaccctgcgagagggctgtcactcttctcgtggttgcaccccaggcaggtggagccagctctcagcaaattgtcggcccccagtgcttggtcccggtgcacacaaaggaaactcaggctagttggaaactccaaatctgccttgctgtcctggacccccatgcaaagcagtggtgattccaggattctaacctaaccggctccaggtcacacagctgtaacaggcaccgtgtccgatttgttcttgatggtttgtttgcacagctcctggctctcctgacatgctgcacttcgtaaatattcagggcctcccgtatagtttgcttaatatatgtcttccctaggcgactgtgagctccacgagggcaaggaccttgtgttttgtttcacactgtgcccgcaagtgcctgttgaatacacatgggctcttcggtttttaactattactgaaaaatgtctgacattgaaatccatcccaagcccctaccttaggctcatatttcaggcttctagatattttcacttgaattttcttgtcaccaagcatgttaaaaactgaagtcacacccatcccctaccccccactcttgtactgtctctgtaattggcagtgtcaccacctattcattccccaaattacacctctgagaaccatccttgtctcttcctcttaccccgactccaaatataaataacttaccaagcctcgcagatttttacttcccaagtaattctggagacagtcttcctctgcctcctcactaatgctagccttgcttcccaggtctggatttctgtagctggctcttaatcagctttcctgtctccagtctcactccctccaatcagttctgctcactgctatctaaaatgcaaatccaattcctggcgctcaggcctctgcttcaaccatctcattgctccccatcacccacgacagcatttccctagtgtgctgtgttcagtgttaatagatgttcctttaagaaatgtctcacgatcaagtaagaatgggagatgctggggtgtacacattttgccttccttctcctttcccctccgttgagctgataatagcagaagagtctttatatacagttgcttagtgtgggtgaaactagataaatccatcacaggccctcccttagaatatggaattgggactaagagaccccaacctcgaaagtctcttggacctgggatcccttgggcagactggttccatcctgtaagacagggaacctgtagagaaagagtggagttgagagagaaaaggagagtgctgacaatgtctctctttcacatgtttctgtgcctggctggctgcctctacccttggagtctgagccgcattcctggatccttatggtaaattctgcttctttgcttaagctagataaagtgaatttctgttacaaccaagagtcctactaaaagccacgtgtaagctatagttatttgtttggtactaacaacatgcaagcaccaaagcactttccatacattgtctcatttaatgttccagatatccccatgaacaaggccagcttcagcacaggcacgtgacctgtgcagttgaacaaggcctggggggtgcctaaaaagattctacgattggtttaatgctctgatgtcaccatctagaaagtcttagtggtttttgacaaaagggcccctcattttcattttgaactgagctccacaaattacctatgaggtattatctctatgtgacaaaaggtttattttctgccagacttattagtgcctttaaaatcaaaatatgcattgtaaatatccaagtgagggacataatatgcaatgtgtcccaaccaaatttgaccctagaagacgtttcttcgtggagaatctcttacaggtttggtgctctgcaagacgcagattaaagccccaccctttagtgatctgcctatgtccctatctcctctggagctcatgattccctatgcacagtgagcagtttcttgcttctgtgccttcacatatgctttgcaatctgccatgctcattaagcacttctgattataattggcttctctttagatttacctacaaggaaagaatatactcctcaagctaatgtaaatatctcgtgtgcttggtagttgaggtggacattgtaattgacaccccaacagccattctcgtcacctgggagcttgttagaaatgcagaatcttggccccatgccagatcagcttaatcagaatctgcattttaacaagattcccgggcaattcctatgcacaataaagtttgagaaacattagtaagccaatcacaataattccactccgcttgctagaaactggttctgtaatgggcgtgccttatccattttgagccagtgagacacaaagaggtgctaactcagagcttctggaggaagaaaagccagtccagtctctctcccctgagtgtaaacaagaaaacatgttgccacagttcccgctgacaggcatcttatgaccacaagggaaatcagactgccagtagcctatccagtgttctctctccccttctaccttaacaactggtcctggtgtgtatgcccgtatggactggaggaggcacagaatggagtgtcttgaatttccagcaacaagcattgcgtttgggaatgtgtctcgttggcctgttgagtccagtggttctcaaccagagttgcacatcagaatcacctggggaacatttaaaatatattaattcccaagccctaccaccagagatttggatttaatgggtcttagctgaagcgtggacatgggtactttttaaaagctccttacagccgggcatggtggctcacgcctgtaatcccagcactttgggaggctgaggtgggcgggtcacctaaggtcaggggttcgagaccagcc

SEQ ID NO: 972 - DNA, 1719 bp, Homo Sapiens
aaaaccctgacccatccatcttcagcacattcacatgtgtaataaggtaagtgatttttaattccaccaggtttaaagacccctgacgtgacttattgccattctgctactgagccttgagagattatggtaagtgccaagaaaaaaaaaatgactttgaactgctctttcaccagttaaaaataacactgaaaccaaatgtaaacataaaagaagtggtcagattcgggttacatattaacggtgtttggtcaggctggagctgaggcacagcagcagagaatgccttttacttatcactgtttccaaacctccctacctggactaggcttgactggatttacaagagaccttttgaaaagatgcagagaaggcaagcagcacacatttcctggtaataaattttaaaggttgctaaaacattccagagattttcactcaacattcctctggccaacacatctgcaatctgccaatccttaaaaataggtgtttttgcattttaatctcacaaacatctttgaaaatgcatttcttctctgcccctgtgttggacaaatccagctttttccattttctaaaaaccacagaaatataatgctgcttaattcatacaagactgagctaactggagttaaaataaaatttctgagagtttgtttggctcactcttccctaccagatgattccattcttaaaacggtcctgtgattatattctctcattacagaggtgtccagaaaaaaaataaggagtgcagttctgaaattatataaaagcaaaattattactctaaacgtaagagctgtgatagatcgtgtcattgaccatggttcttttcccctgacacacacgtccccaccacccacccactgtatccatatgccttttgccatatgactttgcagctctccccactaaaggggcagccatgcgatttgctttggccaatgaaatgaggcagtagtggtggtatcctagttctgagcctaggtctcaagaagtcttatgtgtttctgcttatcctcttatacctctgccatcaccatgagccaaacatcccccaagtagcccactggtcccaggacaaggagggagacatgaagcagagctcatccagctgctgcagccccacttgacccagagacctacactgggaagcagagctgcccagtcaagtccaacctggatgtgtggaaccccagccaacctgatgcatgagcactcacggcattggaagacatcataaacattaatggagagcgggatgccagaataagttgatccaaatgatgcaggaatatttagcagcaaggagaaaggaattcacatttctcagtacccactatgtgccatactttgtgataagatggtttccctccaatatatcctcattgtcagcaatgtcgggaaacaggaatcatttccccttctacaggtgataaaactgaagcaagaaacatacaggctaacatcagctgagctgagatttgaactccactctttttgaccctggagctgatgaatgctgcttctagaggttgagtatcccttatccgaaatccttggaaccaggagatttttggatttgggaatatttgcatatacataatgagatatcttggagatgggacccaagtctaaatacaaaattattttgttgtatatacaccttgtacacatagactgaagataattttatacaatattttaaataat

SEQ ID NO: 973 - DNA, 11065 bp, Homo Sapiens
cttttaaagatggatgaggcctcggttcaatgagggccccaggcaggggacggccacacccaggtttttggaggggccggggagggcgcgttcggggatggcactgggagtgggcagggctgacgcccctttgcccccagcccggtcttcctctacggcgacttcgccgcggggcagtgcggggaggcgctcagtgtagagctcgtgggggcctccgctgacagcggggcagggactgggagaagggcggcggcggagcaggtcgcgggctggtgcggggcctgggggcactgccgagcctacactgcggcggccgcggcggcggcggcagcgcgacaagttgccatggcccggctgccgcagctgccctcccaagggtctcgttagctctgcttggccggccaccgccgactcggccctagggaccccggcgacctagcaaacagccgatccgccgggcgctgacgaggctcgggggaagagggcggcagtccagatggcgcgcaagtgagtgccaggccgcgaggatttgccgccgggacccagggcgcactagctaggtgcgccgcccacccgcggcctcacgggggcgcccgagtccactgaatgagcccggcggggccgacagcagcagtcgagcgcgggtgcgccactctgaccgccgctcgctggtctcattgccggggcctgagcgggggctggggtgggtgccaacgaggaaagcacagttgatctgcaagttagtgggcggggagccagtagggagggactgcggagccgcgctggtcctgattcttcctcactcagctattttaatagcaatgaaatcttgaaggagtgctctgaggctgatagagctgtaggaaaaggtcttgggcgttcagatttttggatgcttcgtatttttcaactttattatctggcaacagtctttaaaactcaatgaccaattccagttctagccttaaacccaattaatccttaactatgaaagcagcatcctaaagtctactttcacttgttagcggcatctgtggaagtagccgagggtctcaggcagtgcagtagctctctgaatagcctctctttcctgagaaagggagcctcagctgctgtgcccaccaggcctggtgggagcgtgcgctcactgcgtaatagagcagggctgtgcttgtgaggtccctttggcccaaactgtgcaggatctgctgcctgcctttcctttttgttgtatcgttattgctttggcccagaaagctctgatgctacctgcctgcaaatagctcatctttactcaatacccgggtcctcacccctttatactgtgccccctctggactgtgatgcctgatgcttgtgtggtcagattgcattgacaagagatctcttccttgtcttataagggcactaatcccatcaggagggtcccaccctcttgacctagtctaaacctaattacctcccaaaggccccacctcctaatacctcattgggggttctggcttcagcataggaatttgggggggcacagaagactttaatccacaagagatgggttcctgacagtagtaaccactccccatccacccctgagtgctggtagtcagggtcacgttagactggagtggtatagagaagacttcaccactctgtagaaaaaggcaagaagtcttaactgaaagggaagtttctggtccctttttcaaaattacctccctggctctttaaaatgctgtattttataaaatgttttcgatttccctttcagatgtgcaggccaacctcaaggtgtgggttgcttagattacaaaggaacttgaattctttcatgtttttgtttaaagtatcactatcatcatctaaagccaagattggctgctttgaggaccttttctgaaccgtgtactaggataataactctgaaggagactgttcttggaaaaggctgatgttgggaccttgctagccattttggaattagggaatgaggtgtattggcatgagcagcagcacttttgtggctgtcaggcagagattttcttttcttttttcctttataagtcacccaacccaaattgttatcaggcagatatttttataggggtagtgggaggcagttcccaagtcccctgtccctctctgcacctagtctaccctctaagattgcaaccatcatagcatcttcttacacattacaatgcagtaaacttgggcacattgagcaccagtcatggccgctgtgttcctgaaggtacagaagtggcactggggccaggctgctgtctggaaaatgttagccactttggtggtactgcccttccgacaccgcctcctcacctcccccacccctacacacaaaaaacaagacaagtagagcaaacaaaccacttctccaggtagacagacctgcaggtctgctcatggtgaccctctctttagcctgcattgtttccaaggccttcagctggcctattgtttgctaagggcccacaccttggcaggagctgaaaagagaggatttccttttgctcaggggaggagggtctgtcctgggtttgcagagataggcttcttgtctatgctgctgaagaaaacaaactagacaggagtcagatgtgggctctaccttcttgctcagtctctaattcactgtggccttgggcagatcagttctccatccttattagtatcttgggtggaatactccttaaggaatctttcaagtattgagtgcccccatgcccccaccaccttccacaaccaggcctaggtgaggcaggaaggaagaaaagaaagtctgggtgcagagtgtgtagtatgcctcacagtacagcctgcaggaaggccttggataagaaaggctgagtgatattccagggggtgggacagaacagagtgtggtttgggtgggaagatgacctggtgaacctcaggttctctcaaggctttacagaggtgggagcagggccatgggtaggctggctacagtatccctgctgaaagggaatacttgttggtacaaactcagctcttggggcaaggatcatatgaacttgcggtcatgaaagtgtaagtagggtagaaatatgaggaagggagaggcacttggtcatggccaaggctggagtgtcattaatgtgtgggggttgaggaagcaggtcacaggattgttggatggctcattctacagtcttgtgccctgggagcccctcatgtgggagacaggtggtggatgtcaggaagagctagaggtgggaagggtaggcttgatatttagactatgtgtcaagtagggcagggccagttactgaaataccgaaacactagttgtcatttggaaatggctgaggccccaggctccctgaggcccccagccaccttgtccttggaaccttgctggtgctcactggcccatacactgtctgcccagtgtattccctgggctctgaccccagtccctatgtgtcctcttgaccagggtatgcacctggacgtcagtgggaattcacttccccaggggaagtgctggaatccccatatacacttctggctcctgaggctgtgtctgctggatggtgcctccccagtgtcactgtcccgtggtggcttgtgggaaccctgcctgcactgtgaacggtatcggtcgttatgtatgctgacaatcacccctggtaaaggaaggggacagtagggtgaagaattctgttttgggtgcctggccgctttgcagcggggacagagggcaagacctggcaggcctgcagtcttcctcggctatcgtgaagagggttgtgagtgccaaatccatcccatagggagatcccagaggagactctggcaccccctctgccagagggcaggcccatgagtgcggccctgcagaccaacagtttcttaccctccttccttcgcgagacctggcacagctgcctgcctcactcctgggagccgagtcctactgggagctcgttcctgccaaggctgggatccagtccccctctcccctctgtgggcacttggcaggccgaggtccctgcttccctctgccagttcctgccaaagctaatctccctgcggcctgttcctggcagtggttgcacgtgggtatctctgctgggcaggcctgcttccatcactggcacggaccccatttcccaagaatcctttttgggtggcacaatcccaggcagaattctcccaggaggttcctgagtgcctcccttgctggttcagcacctgatcacgttcctggattccccctgaactcctccagtgtctgcaggatgcttttcagttcacaaagcactttcatattatatctcattagatgctcagcagcccctcaaacagcaagtggtgcccttgagcctgcagggccctggagtgggcagatttcctgaaccatctgctctgactctgcctttgggccagtggagaggcctttgtgagaccaaatcttcaggttctcggtggggcaggtggcagttcagtaggaggtggcctcgggcctcctcttctggggaaggtgtcagagaggggtcaggagactatgtagcctcttgtggccccagtcccctgatcaaaaaccaataggaaaagtctcttagaagagaaacagcttttgggttaatctgtaggggcagtgagaaagggttggggaggttggggcccagctgggccacgtggattcgatcttggcttagagtgggcacaggaagctatgtgatgaaggggagcccctagggaggaatctgggtacaggggatggggctggaatcagctacctggtccgtaagttgtgttgttaaatttggagaaaaactgttttccaaaaatggaggtaaattgaagtttgtaagagctggtgaataagccatgcctccttggtggtttggagcaagacgttttccacgcaggccatttcatcaagactcagtggtaatttgggattgcctcagctctcccagctcggctgcctgttgctgtcagtgggtctggggggcctcagggctgcagaggcttggtggtgtgggagtccttcacctgagggctgacgtgccttttgggggtctggagcatacttccaggagacaacctctcttcctcctgtcacctctgctcctccctcagcctccctgtgttcctttaagcagggggcatgggaagaatttcttctgaagcaactgatgttctaaatttgagagaggggaataccatcatgtggcctgaagttagcagcccagaggctgagggctgtggctctggcaggtgctggtgtccagggtgcaaggaagactccaatgtccagaggactctcatgaaggtgactgggagcagactgtggtggaggtgacagctcagggaggaagatgggattgtcaggactcagttctttgctggaagagacttctcttccatggggtggtgagtccaagtgagaccttggttcctcttcctgggtagaatcctcccttccattggaattatcctaaaggtccaccccactgactcctagcggcctctttcctggtaaggaagtctgattggcttttggcttggctaacctgagtcacttcttccagagctgtcctcatgctgcagccactgctgtcccacagcagctgtgggtcatccttcagctacagatcctcccattttccttgtccccccatcagtgtgcgtgcacacttctgtgtatgcaggtttggggtaggcttggtctgcaactgcgggggccatgcgcagttgagttcagtctggtcatgccacagaattatttacactgaaaccctaaaaccctctagcgaaaggttagatctttaagtcagacttgtttggcaggtcagtgagatgacagggaggtttaagacctgaattgggggatggggcacaaaggagtcgtggctgtttctggatctaaggcctctgtagggaggtgagatccagactgggtagaggctggtgattcttctggagccaactctgtgccaggccctattgtggctgtggaggagcatagttaaaactctgtgctttccaggacttgaagtctgtgcactgcccttactacgataaacaaaggaatgaaagttcctctcccaggtccatgattcagagggctcttaggggtatgtgtgtaggaggcggtttgctgctcatgcagacatttggagaaactctggttccatctcgtcacccccacaccagcatccaggaagacatatgggcagactggtgcgggccagcaggtgtggggatgcttctttgctgtgagcttctgccaggtgttagagagggaaatcgaagtgtccagctgccccagagctgggagtccttcagatttaccagaactttctgattacaaagacttcctgcttattgttttgattcttaggattataatcttacttttgctttccatgctcacatccccagtctgaatctggggctgcttctcaccactgccagcctcaaggcagagaaggcaggctcctctcccatttgtgttccctctaaatggttgcataggtactcgcttgcagaaccattactaccaatagtggaaaaatgagatggggagggcaatatacttttattcttattttatttgagacaggttctcattatgtcacccacacccatgctggagtgcattggtgtgatcacagctcctgggctcaggtgttcctcttgcctcaggcaatttttaaaaaatttcacacttgattggccaagaacctcccctccgacccccacaacaacctacccagcatttactcctcagtctgaggacacgtccctcacatcagcccctctgctgtcttgaaaggctcacctcctggaagctggctcctccctgattcagggcccagcacagcgtcggaaaaatggagcagtgctgcccactgtgttcgaaggcctccctcctctgttttattctgggccccttgggcagggcttacatcagagccagtcctccttggctgattcaaagggacaaactcctgggtcagtcctgaggacaaggaatagtgagtgggtgagggaggggctggcaacaactggagtgtgtctggccacaagctagactgtggctgcagctgatggccatcatcaagctggcgccaaagctgccctcctgcccaggtttccagagattctctagctagttctcttctctgttctttggaagatttactgccttattccaccgctttagtggttatcctacaatttcctacatttttctttgacttaaataagtaaaatctttactccttttcctgagccattcaaggaacttgggttattttaactttactttcctcctgccttacatgattttcttttaaaaacttaattttatttataattccagagttatagaaaatttgtaacagttggtgtacagtatttccatatatcccctctcaagttccatatatattaatatttaactacatataccttataattctttccctccccaacatcatttttttctgaactatttgatactgatctacatatatgtgctgtgttacccctaaatatatccttgtgtatttcccaagatataaaaatattctcataaaattatcacacagttatcaaaagcaggtaattaagaagacacaatgctatactctaatttacaaaccttattcaaatttcaccgaatgtcttagttatgtctttatagccagagaaggaaaaaaatacatatttttcttgtctaggatttagtctagaatcatgttacatttagtcatttctagtcttctttaagccgatttctcttggtctttctttcacttttcttttttgaggggtacaggacaattattttgtagaatgaccttatttgggtttgtctgatgtttcctcatgattagattccagttatgtatttctggcagaaatgccacagaagtgatattgtgtccttctcagtgcattgttatcaggaggcacatgatgttggtttttgtcccactgctggagataataactttggtcacttggataaggtggtgtctgccaggctttgtctgccattgcaaagttaatattttcatttggtaattaagctttgggaaatactttgagatgatataaatattctgtttctcatcagactttacccactaaattttagcatcctttgatgattagtgtttgaggtataatggttgtaaaatggtgaattttctgcttccattatttctcatacatttattagttgttactctactgtaaggaagagtttacctccctccctcccaatccatccatccatccatccatccatccatccatccatccatccacccgcccatccatccatctacctacccacccatcttccattcagtcagtctggattcatagatatttattttatttaattagttatgctttgttactagcattggtgattttgatgatcaaaattatcccagattagtcctgtgagagctcctccaagttgattcttgtgtctttttgacacactgctattactttttgagcacttccttactttctgttactacaagatattccaggctcatcttgtactttcccggctcaaactctgtaatctggtatttttctaagaaaccctgattccttttagcagagaattgtgtataaaaacaaaccaagacctggaataggtctgttcattgccagagtgttgttatttttaggccctgtcatacatatacacacatgtgtgtgtagtatatatattatgtaaatatgcacacacacacatgcaaatccattcatctatctacctacctacttacctacctatctttcttaaaaaccatgagttcatactgatatgaccagttccaatccaacactctagagttcattttaaccttctctctttccatatatgtaatttccttctccaaccgtgaaaaacctggtttcagttacccacagtatatttacttatttgcttaatcctagaatacacagaatgtagtttcagaattgttaactcatgctggtgtgggaaacaaatctattaaacagagttcaatatttgctactgtctttttgccctagcctgagaatacagaggcaaagtactgcttcaaaacttctgttatcaccccctacccgtactgtgttttgtcattcacttaacctacagttcggtacacttgcttccatatgtattcaatgctaatgtttcctccttttatccttgttgattgtatttactgaaaaactgagtacatgaaacattaacatggttgtaaaagtcagaacagatctgtacaaaaacatgaactcagagaagtgtcactgccctccatcttctctaccttgctcccaccatcttattcttttcacccatcaggctaaaaaaagacatcagagaaaaatatatcctaatatgttgagtttattcgggagtaagcaaaaggattataatctgggaagcacagctgtagcaagccataggtacaggtacatcaagccaaaggtaaagggaaatttttactggcaaggagaagctatgtaagctgcttggagacagagttcattggttctggaggctcaaagctagaattagcatcagttcattggtggagatgccactgctaggcatcggcctagcatcttatcagaattgctacagtcctaaagaatgtatagtgataaacctggtcatagaaatatgtgcatgcatgtaaaatgtaaaatgcatgtaaaatgtagatcatgaaaagcatgagatgtataaaagatgaaggaatttctcgtggagttattttagaaagtccttgaaatagtccttatctcagatgtgcaagcatgagctgtgctcctttgtgtgttctggctccagtttgctcgggtctgacaaaagtgacttattttgctatctgcaactttagtcactccatttccacccactcctgtatggaaccaatctcattagtttctgggtttcctttcctaagtttctttttgtatagttgtgcagacaaatatatattttcttattcccctttctttcttgcacaaaacgtggcataccataaacactttctcacactttgctttttaaatttaacagcatatcttgggagccattctatatcagtttatagatgtcatcctcattcatttttatagctgcagactattccattcgatgatgtaccatagttcattcaaccattttcctatgtaaagtcattttggttgtttctaatatttttcaattataaacaatgctacaatgaaaatccttaaacatatgtatttttgtatatatttgaatatgtattaccaggataaattataaaaagggggaaaagcatgtgccattttgtttgatatcatcaaattctcccccattaaggttgtactaatttccattcccatcagaaatgcttgagcatctactttcttcaagccttgccaacagaacgtgttagtgtatgtttacatttttgccaatctgctaggtgagagataatatctcagtgttattttaatttgcatttctcttattatagttgaggctgaatgttttttcacatgtttacgggacattttaattcttttttcagtcaatggtctgtttatgtctttgactatttgaccatttttatatcaggtttttgaaacttctatcgagtagaaaaagttatttatatattagcgatattacatatgtatctgtgttatatattaccgatcttttctctcagtgtttaatttattttgggatttttttttttttttctgcgacagagtcttgctctgttgcccaggctagagggtagtggtacaggctcggctcactgcaacctccccctcccaggttcaagcgattctcctgcctcagtcttctgagtagctgggattacaggtgcccgccaccacgcccggctaatttttgaatttttagtagagacggggtttcaccacgttggccaggctggtcttaaactcctgacttcaggtgatctgcctaccttggcctcccaatgtgctgggattacaggcgtgagccacagcacccggccag

SEQ ID NO: 974 - DNA, 1644 bp, Homo Sapiens
acactgctggttaactgcttcggaagaggacagcccgcagtctggagtgagcagcgaagcagagaaaaggagacgccctttcggacaagggactggttggtttgttcttgtgcagagaacccactcgctcactctcaaacggtagctgttcggtttatttgtccttttgcagtgtatgcggagccccactgtgtggcacgcacttgcttccggcagagatcctgcccttcaggagcaactaaacttgttgcaaataaagtgctgtgaaagttcagaagaggaagatattagatataacggcatcattctctcgttttttaagtgttcctattatgtgccagaatgctggtccagtgagggctttatgaaggccatccagactacaggaacagaattgctaagcacatggggcgggaggcggagggaatcctccagggagaccaaagtaagtacttcagtttccttgaaggcttgtgtgatgggaaggagtgctatggtaggcgtcactacatattctgttcgttttaaattaaaaaaccatgggcacatattgccaaaaataaaaaagggaaggaaaaaggtatagttgggagatagatgaatacaagagaaattaaggacattaatggtttaagccttgaaaggctagaggtggaactataactggacaaggtggactagggttgtaaagtcctctaacccagcggacggggtgggggtgtgtgtgggttggggatgaaactgttccacttcagatcatcaggcattagattctcacagggagccggcaaacctcacatgtgcagttcacaatagggttcgcgtgcctatgagaatctgatgccactcgctaatctgacagcaggcagagctcaaggcgataatgctcactcgcccgccgctcacctcctgctatccggcttggttcctaacaggccactgtctggttccggtccgcggcccagggcttggggacccctgccctcttgggtagggaagtatgggaaagcagtgctttagggccaatgaatctataaaacggctgaaagtggagacagactgttggcaaggaagtcaagtggttaggaaactgcaggcccagggttacttagtagtggaagtaagaagaggtaaatagaatcaatccgtcttcattaaagcaagacttcccagaccactctacccacacccttcaataaatacacttacctgtatcattcatttgatttttattatctaggaatgtctgggaccttatctgttccaaataaatgatatttgcagagcttagctattttaacttccaaaaagcaaaaagaatggaaaataacttgctccataccctgttttctgtagacattctctgaagtttttcataatattgcttaaagaatgaaatgtatacaattcacaactgccattcccctctgaaaagttgttacccaccaaaaaatagtggtccaactcatgcatcaaaagcaagtttggggatcccactataatagtctgttctgactcacaccatctgcccaaattatatagatcaggctgccctgacataaccccagccacacaccagcagcggcccccacgctataacaaatctttaaccaattattaaaatattagaaaatgcatgaccat

SEQ ID NO: 975 - DNA, 1498 bp, Homo Sapiens
ggccccgtggctagagatggactccagattcacacccaggctgtatgtctgcacaacttggactgcacaacccagcacagagaacactcgacccccgctcacgcaacacagcaggatcccgagcttggaacccaggtgttcacaaaggggtcccgactctggaacccaggcctccacagcaggatcccgaccctggaacccaggcgtccacagcaggatcccgagtttggaacccaggcgttcacagcaggatcccgaccctggaacccaggcgtccacagcaggatcccgagtttggaacccaggtgtccacagcaggatcccgagcttggaacccaggcattctagtatccagcctccaagtcttggtcctaccctggtggtttacagaagccgagaagctgacagctttactcacccatgacaaaataagaaaagcacagggcaatgtaggaagtttttcataaagttaaatccctttaatttaaaaaaaaaacagcttttttggttgacttttcccctctcttttctaaaataagggtgatcttatccagtggttcttattttatattcttaatttagcaagataaaaatgtgagcagctgcacgccagcccccaaactctaggggaggtttttctggttcagactgtctcaggttcgagcctccttagggcaccccctttccgtccaccttagcctggaactgagacttctttttcttttgtatctgtccttctcagatctcatatttgtattttccaaaacaatctagttgaagaaatcctatttggtatgtttgaaatctttatgctcccagctcaaactctggattaacaacaaaacagaggaaaactctttttcttattcagcagtcaaacttcaaggcaacttcagccctgggaactcagccagttgctgggaagtaaaggaatcaaaggcttctaaacagtaaaaaatgtctttagagctcggctcagagggagctttggccttcctgcaaattaagaataatgatttggtgagcttgtttatctcccctccaccagcaaggcttggtctccccaggggtaaccggctgcagattcaagaggaagctgggagggctgtctggggctggagaaggaggcagctccaacacgccgcggtcaggcagtgtggggacaaagaggtctccttacttccacagcaccgagtcatcgaagtttacaagacacttctacgttgatctggaaaaaggaggtgttcctagtacatcttagaaagatttccataaaacgggctaaaaagcaatcataaaaccacaacaaaacacaaacaggcaagggaaaggataaacttccatcacctggaagcctcagagacaggagagggtacacaggtgagagccttggctgggtgggaggtaggagtcagaccggaccctctgcagaattagcagtggtgtgcgctcacctctggagctgctcctctgagatgggcctggccccctagataat

SEQ ID NO: 976 - DNA, 4310 bp, Homo Sapiens
tcattttttaggtgacattagaaatccggatcatgttaaatctagtttttaaatattggcaacaaatccacttgttaaaaactgcaatgatcaaacatgtccataggtcaaatctggccataggccaacagtccatgctctccagctggacatgtcaaggaccaaatcttctcaggcaactgctgatcgaacctccatcaagcctcagggactggggcaaaatagggtgtctacctagtggcccacaggccacacaggctattccagaatctggccctcaacaacgacttgagaaggtcacctcaattcctttcactgaaccttttttgttttgagacagggttttgccctgtcacccaggctggagtgcagcagcaggatctcggctcacttcaacctccacctcccaggttcaagcaattcccctgcctcagcctcctgggtagctgggattacaggcatacaccaccacacccagctaatttttgtatttttagtagagacggggtttcaccatgttggccaggttggtcttgaactactgacctcaagtgatctgcccgcctcagcctcccaaagtgctgggatgaaaagcatgagccaccaagcccagccctttcactgaactcttaaatggccctttccaggccaaatagcgttgcctggaaccatttagtaccatgtaccatggttctcagatccagaaacaggatccgatcacctatgcattttctaatacataagccctaagttattttaggtctataaaaactatacgctaaggtgggggtaaaaaatctcacatcaaatataaaaaatttaagtcattaaaggagatgaggcatttgtaaagaacttttaaaaatatcttaagagctggaggggtctttttgttggttggtttgggttgggttttattggtttgtgtttagagtctggagtatttgctttttaaaaaggcagtgaaagaaaaaaaacgaaccccttccaaacacatttgtcatttttatatactatatcatgcatgtttatgctggctacattaggaacaagcttgaattacaacccccggtttacctaatggagttctgaaaagccgtccaatcttcctggaagagggagttgggaggaatgtggtccagtttgcacttctttcgtatggactggagagtgctggtgaaatcagacacatacctgccgggaaagggaagaaaatggtagggaggtcaccactgattccccaactctaaagagacctggaattctacagctctggacaaattgctaatggccttgagagcatctttagaggctcccaccgacgagtgaaactgcttgtaaacctctgaacacaaaaagttcttctctatgtggcaagactgtcttcaccacctggttgagcagtttctaaaagagatgcccaagaggagaaggaaggaataatcgtgaagttgactccagggagcaaccaggtgagagatgatgctgataaatcccccctcatccagataagtacatttctgtgaaagcaggtttgaagaactgtttaaacatcacggtcccatggtaataactgactgtgacctgggataacgtaaggaaggtcatgacatccaaggtacctctgcatcattctcatcctctaaatttagattaaatacccgtggcaaaaagattaaagtttcacggctggcaagtgtctgactttaatgggacagacgcatgaaagtggattcaaagccaggagatcctccctcacaggctgcgttgtttgctctcactgtacacacatacttttccctcacagcatctaaaacactgtaattaaacagcttgtttagacagggcatggtggctcacacctgtaatcccagcaccttgggaggctgaggaaggaggatcacttgagctcaaggagttcgagacctgcctgggcaacagagtgagatcccatctctaaaaaaaacaaaaaaattaggcgggtgtggtagctcatgcctgtaatcacagcactttgggaggccgaggtaagaggaccacttgtgcatggaagttcaagaccacactgggtgacatggcaaaactttgtctctacaaagaatacaaaaattagcctggcgtggtggcgcatgcctgtagtcccagctactcaggaggctggggtggaaagatggcttgagcctaggaggtcaaggctgcagtgggccatgagcacgccactgcactccagcctgggtggcagagcaagaccctgtctccagataaagaaatagcttgtatgatgcttattgctgctgctagactttaagctctgggagaacagagtctgtgcctcatacttatatccccaggaactagcacagagctggacataaaggagggagtcatgtcctctgaaagctacgaaacctgtgcctcatacttatatccccaggaactagcacagagctggacataaaggagggagtcatgtcctctgaaagctacgaaacctgtgacatttgcatgcatcacaagaggccttgccgcttgcccctcccaaaacgaagctctaaatgaggaaagtgaaatgtgaggacccagggcacagccccaaaaggtcagtccatgcagtggagacacaggccactcaatgaaccaactggaagaaacggcttcaggtcactccactgactgcaaatgatcctgctgctccctttacagagagctcgatgctttcaggtggaaagctgcaaaacccagagtaccactgacaacaccttccccttgcaccaagagaggtgacagctttctagggttataagtcccaggaaggagaggggctggcctcaagcacaaactgacaggggaatgttaaggaacatgattgtgctttagccatgggaagttaaacaaccatgtcaccacctctgcaactatggcaaatatccatgtgctctgcagaaagagcaggtacacactgcaggagaaggagttttgtttagccactattctcaggtatggttataagcaaatgctttctctatttcattagctgtcaatccagaattctaaatggtttgtcatgaaatctcagaggaaaagtgtagctttcatcacatcatttttgttcccaaaccctccagctgtttctcacaatacacatttccaattgtcaaccatgtcagagtcaccgtgttaggggctttaatgatatgcttttggttaatattcacaacctccttggaaaggagatattgtcatcatcagtttactcagagaggaacactaccatctctaaggtccccactagtaagtgtccagagctcccatgcccatcacagtcttaatacccctccttcttgaaccaccggttggccactatactctatgcttcatcctagttcgagttaggccaacctgcacctgcctttcctgcgtaccctgttctccttgcccctgcctcccttaatacccttccccaaaccctcctcactactgaacaatgtgccatttgaaccctgctcaagttagcttcaacctgatttccctgattttataagcatcagctattttggtaacttcaaaatcttcccttttagagaagatggcctgggttttccagatatacttttgtacagtttgaatgcttaatatggaaatgtattattttgatttttttttattttttattttttgagacagagttttgttcttgttgcacaggctggagtgccatggcacagtcttggctcactgcaagctctgcctcttggattcagcaatttttatgtctcagcctcctgagcagctgggattacaggcatccaccatcatgcctacctgatttttgcatttttagtagagatgagcttcgccacgttgaccagggtggtttcgaactcctgacctcaagtgatccacctgcctcagccacccaaagtgctgggattacaagcgtgagccaccacacccagcctgatgtttctttttctgcaggaacacattcaggctcatccggccacaccagatgatgtgttcctatagaaatgcctacgtggaactgccctgggaggtgctggatgcccgatggcaatgccagggagctctgggtccaaggagcctccacagttcacagaggcatgctcagtatttctggaacaatcagagacagggcttcaccatgttggccaagctggtctcgaactcctgagtttaagcaatccacctgtcttggcctcccaaagtactgggattacaggcgtgattcaccgcaccaggccaaaggtcctttttcttgttcaaataaactttgttaaatttaacttgtc

SEQ ID NO: 977 - DNA, 16464 bp, Homo Sapiens
gtaggttctttaagcattgacgagctaaagaccattttaaattctaagcctagggaagcttacaatggaactaatcagatgtttttatgtcggtttgttccgagacagtggaagactggaggtcatgtgcttgtgtctaatgtttagcaaaatcttagtgaaacgagggcgataggaatgggggctggggaagacttagatgggataaaaagaggtgcggctggaagaactaaatcactttaaaacttctgaaaataaatgttgaccattgtagtcagaggagtaaaatgttcagagaaatggggatgattaaacaagaacggcaagccagattgagtcagaaaattatcttcctgccagaaattctgtctcccacaacggcatcagggggtggttacttgcccagggtgtagtcagtttttaaaaagcttaagggttaccaacatattcctaaatttcctgaatttgctgtgattccaggattcatttaaactcttgagactgttttactttcggcacgaaatcagctcatgggctttataaatgtagaacctactgcattatagttcttctttttgtttattctaaaactgttagtagcagccagcgtattatatgatttggattgggccatgaacaaccgtaacgagtgataaagcaccctttcctgttccaatgcaaagaacaactatgaaaagaaagtactggcaaatttatcatcttgtagttagttcctggccaaagaaaatggtaaggccattcttttaagcagttaaaaaaaaatggggatgggctcttaaactttggcatgctaaggccattcttttaagcagtttaaaaaaatggggatgggctcctaaactttgacatactaaagcagtcgtcatttaggtaaaatctaagtcttaatggaaatcgtgatttcatatctactgcagcgttagcaatcacataatgataacttaaatcagtaaatcgttgaactcggttctctaatctttgaagaatagaaatactttttatcccaaaagatgttttgagaattaaatttgcagagaattttttaggtctttagttgtaatttatagagctaggtcttttaactttagtggaaaccatgccctccaaacccaagtgactggagtcagaatgtgaaataagacgacataaaatccctatttcttaaggggctgggcgaaagtaatggaacaaaatgtaacgttatgctattgtggcagagatagctaatggaatgtttcatttctaagtctgtaatttcagtaattgttagaggcagttttccatcaataagttagatcaaatggttaaacccaatatgaatttataaaagcttaatttaattttggattgatttaccagatgtttaaggtggttataatgggtagtgttgatggtggtgcttttggaaaaatgagtattatatgcctgctcatccctttacattatcttatcatataaacttcttgattactcgttatgatactcttaaatcgtacatttagaggaaaaatcttaaagtaatctgtaagaccatttctccttaaaatgatatattatgagatgaaaggaaagataaagataatttagaagagatccagaagtggactaaatttctggtaaggagggggctaaagatgttaaaagacatcttaggaaaagcatatgatttataacttttaaaagtgtcatttagatggttaaggatttgtgtttaatagttctcttgaaaatattgttttccaaaagtttaaaagccctagctacttttatacatttgcccttaaaaaatgtacagaatttattacatcaaactgctacaaagaaataagaattctgatttttgcaagtaagttggaaatcaacgtagaggacaaaaagtggcatagctatatctaaacaaaaaagtatgtaattcaaaagttggtccacaaagaattgaaagcctttcaataactaatttaaatgatagaaagcagtatgtatatgcaagtacatatgctccctgtatagagagtggttagtaagtaagatggtagcctaactcactggaataaagagatccttggagtcccaaacctcaagactaggagtcttaatgcagttaccaggctgcatgcctgtacccagagaccatactagaggctgtgggaatcctcgattactgctcttagagcccccaacttgactgtttcttctgtacctggtacttttttcaaatatttcaaattgcagtgatgcatgggagatacatttagaaaacataatgcaggggaataaaagcagttaaaaactaaggacagtttctactgatgaaaataaaaaactgctacagcaacatcttttcatcatctgtaaacatcatacccccaaattttcctaagttattatctaacctcatcagtagcagatggtgaattatttcatagaaaatcctggaatgtaaactctagatactcaagaaaacctcttttttttcaatgaaggtatattatatttaaaataataatgatgcattaaacattatgggataaagaaaatactttccatagaaattaagcaatggcctaggcaaagagaagtaaccctttagcattaatactatcagttagacagtgacatttattgaacattccctgtgttgtgtattaagaattggactacctatatcccagtcaacaattttttctggagtttagaaatagtttatgcttattttctgtgttttttattaccaaattgttattagtttggtgcaaaagtaattgtggtttttgtcacttacatgatggcaaaaactgcaattacttttgcaccaacctaatagaaaaatacaaaatggagaatagttttcaggttccacaaagcatttgctggaaataaatatcagttgtctaaataagtagtacttgatttattactatgattttcgtagggttccatttctggaacaatatcatattaataaaccctttcagtgagaccattgtgtggtattgcccaaaaaggaaaaaaaaatgtaatgagaaaggactaaggctaataaaattccataaatactattataaagaaaagtataatttgactgagatgcacaaatgcttacttgataatgaggtgtttttaaggaaacttctattaaatactctttttgagtttaatatactatgaaacaatgttgtcttttttttttttttaatgaagatttccttgacttccaaagacctttgatgttcaagcaaaatgtagcaatttggtaaaagtaaagggtgcatttcgaactgaaataaacataatgtcctattaagacctgtattatattttatggaatttaacttagaatgtaagatattagctctgcggttttacaagcttgtttaaattctgcaatgtagggcaacagaaaatccaaacaaaatccattaatgactatattacttctttatttttctttttaaatattatatgtggccagtcaggatgaagttttttttaaactacatttcctagttggacagatcaagagtaagctccagttttgctataatctcgttttgtgattgctgacaagtctattactccctcagttcccctatcactaaaaagaaataacattgtggtaaagaggtgttaaactaccaaatccactgaaaaagtatggaaaaaggtcacagatgtggcagctttggcatcttcagaagaaaagatagcaactcaatgtgatactattggcaataccatttgttaattgaaaaaagaagaagaaagcagttactagacatccatgattttatggagaagccatattctgtcatagatgagctatttacagacattcaatggcacattctttgacaaagtgaatcatcactgtctagtctttcttgtatatgaatttgaagtattgattaaagttgtagcatacctgtaattttaaactgtaaaactctaacactcacaaaagaacattgaaagactgcaaatttctagacttggaggttataattccttctgtatgttactactatcagcttataaaattttaaaaaatgtgagtgtagaaacttatataaactgtattcacacatgaaggatagcctaaatgctccggactgataatctgaaggtcattctcacctggctgattgaactacttttattcatagaagccaaagttttgaaaggtacagatagaatcttgactaccttgcattcgcagttacgttttaattgcaaaataacaagctctttagtcactggaaacaaaacacttttagcatttaactttataatacttgaaatcctaccttgaaagcattcatactcattaaaagctcaacacatgatccatgtttacataaggatttgggtgttgcttaaaatgatcatgtaatgagctgcttctctgcaaattaatattcactcccttccctcatccttaatgtgggatctttgaaggaaaaggaagtgaccaaactaaagacatagggaaatgcaaaatcaaggtgaaaagttacccagagggttgttttaattttggccatcaaccccctagtgaataatggtaacagtattgttttgagacccattttgtggcatttacctattgttaaactaaattgactagatgtaaatatattttcatcttcagatatttagaatttctatccttccccattgtttctggattttgatactaatcttttttctttgcatattgtatatatttactcaacaactaatctaattttagatttttagcttatccacatttcatttttgtttatttcattggtatttcatcaatacaatggctctacccttcaaggaaaaaaaacatcagcccgtcccacaaaaacacatatattcaagaaagataaattacattgtgatgattcaatcataaagctactcaaggatgtgctccaccaaaatgaggatatgaagccaatataaaggaaggcaatgaatacaagagacaggcaaagggagttcccaggacataagcaagggacgtcccaggtagcaagtgtgcacctggtgtccagggccatctgtccaggctggagagcaatagggtgatctcggctcactgcaacctccacctcctgagttcaaacaattctcctgcttcaggatcctgagtagctgggattacagggagaagtcagctgccatgtcatgaagacgctcgagtagccctatgagattcccatgtgaacagaaattgagtcctcctgccaacaatcagccataatttgcaagacacgtacatgagctaccttagaagagaatccctgggccccagataagccttcaggtgaatgcagccctggaagacatcttaactgcaacctcatgagagaccctgagccagaaccaaccagctaaggcactgcccgattcctgacctacacgcatgggggtgcatggtggctcactcctgtaatgccagcactttgggaagccgacgtgggttgatcacttgagcccaggagttcaagactagcctggccaacatggcgaaagcccgtctctactaaaaatacaaaaattaactgggcatggtggtacacacctgtaatcccagctacccaggaagatgaggtacaaaaatcgctggaacctgggaggaggatgttgcagtgagctgagattgagccactgccctccagcctgggcaacagagactctgtttcagaaacaaaaacaaaaacaaaagcaacaacaaaaaaaattcctattgaaatttaacttacatgtgataaaattaatgtaacattttatatatattatatataaaatatatacttatatattatatatacttatatataatgcattatatatgcttatatataatgtattatatatgcttatatattatataatacatcttctaatatatgtgtgtaatatataatgtaacctgtatatcagtttcacagatgttaacttaacaagcaaagttcattgaaccatgcatttgtattctatgcactttgttatatatcacagtttaaaaggtccaaagtagagtatagacaggcacagtggttcatgcctgtaatcccagcacttagggaggcagaggcaggaggatagcttgagctcaggagttcaagacctgacggggcaacagagcaagatcctgttctccacagacaggaaaagagaaagtagagtataaatacagcataggatcttgaaaatcagactggatcaaaaggtgaccatgaactagcaattaaggttctgtttaaaaacaactaacacgtgttgggacataagaattagggtagcacacaataaactatctcctggcttatattttttaaatatcactgggtgggtcagtagtctgaacctggttgccaaggcagttcctaaacctggggagtatgactgataagtttttcaccttgacagcagaaagcagttgggcccaagagagggtaggcttgatgctagcaaaattatgaagatgaagccttaagtaccttatcttgtttgtgcttgccccttgctctgcttctctacacctttggattctcagcagcctgctgcttttctacacctttggattctcagcagcctgtgtatttgtgtacttatcccccttcccttcctgtcatctacccatttccaaagccaaggcaggtctaaagtcctgctttgttgacttctggttcaatcaggggtgtttctatcatatcacactggctgaaggtatttgtaccttaaccttgatctctgattatgaatgaaaggttttgggtcctattaaagaaattttcatcaccactgactagttatttgaggtgtattttgggtgaggtgggccttgctgcccctggggtagcaccttgtaagctctggtatggtatgccctggggagaaggtgtcagctaacttttaaaaatcactgcaggtgattcagatatgacaacctgtatcctgtatgacaacctgccttctgtccacaccccgtctctcaatgagaaccaccttttacaggaaggccactcataagcagatatatctatttattcattcattaaacaactatttcttgagctctaactgtgtctggctatgggctagcactggtgactcagggttgaacagaaacaggcataggccatgcatggtttagtgcaagacacacattaatcaaggcaagcaggtaaatgtaaagttaccagtcaggtaagtgtcgtaaatctgggtttactcaacataaagacaggtgaattgagagttagcttaataattatgattttcaagtataagatgaataaattatgtagaggagaatattatacactgtaaaaaagacataaaaaaggaagtttgctgtagcataaagaatttaaggtaatggctaccatagtcagagggcctgctctgtgccaagcatggtgttattttattttatttttttatttttgagactgagtcttgctttgttgcccaagctggagtgcaatggtacgatctcagctcaccataacttctgcctcctgggctcaagcaattctcctgcctcagcctcccgagtagctggtactacaggcatgcaccaccacgcccggctaatttttgtatctttagtagagacagagtttcatgtgagccaggctggtctcgaactcctcacctcaagtgatccacctgcctgggcctcccaaagtgctgggattataggcatgagtcactgtacccagcctgctgttattttatatattaaaaattttacataaatatattttacatatttttatatttttataaaatagtgattatatattatcatttattaaactcatatatattgataaagcctcacagaaccctacagagatttaaaaaagcaatacttagagatattagataatctgttctaggtcacccaacatatatatatttaataacagctttattgatatataattcacataccataacattcacccttttaaaatataaaattcagtgggttttagcatattcatgtacttgtaaattaccactatctaattttagaacatcttcatcacccccaaagaaatcctgtacacattagcttctacctttcattccccctcacctctgccagttcctggtaaccacaaatctactttctttctgtatggatttgcctattctggacatttcagtaatgttttcaagattcattcatgttatattgtatatcagtactttgtttctctttgttgctgagtaatattccattgtatgaataacctcattttgttcactcttcagttgatgaacatttgagttgtctccactttttggctattataaataatgctgctatgaatatttatgtacaagtttccatgtagacatatgttttcagatctcttgggtttatttctaggagaagaaatgctagatcatgtggtaactctatgtttaacattttgagaaccgccaaactattttccaaagtggctgcatcattttacaacctatcagcaatgtatgagggttcccatttctctacattcttgttaacattatttaaggtatcctagtgagtgtgatgtggtatctcattgtggttttgatttgcatttcctcaccagctaaaattcatgaaattcagattcaagttcaggtccaaagccagagttttagccactgtgcaataccatctctctcatgctcctagaagtaaggaagaatacgttgataagattgtaacgcactggattgaattttaattatcatctgggtattcacctctagaagcttttaaaaacaagggcttttttgttgttgttgttttgtttttttgagacagtcttgctctgtcacctaggctgtagtgcagtggcgtgatctaggctcactgcaacctgtgcaattctcatgcctcagcctcccaagttgctgggattacaggtgtgtgccaccacacccagctaatttttgtatttttagtagagatggggtttcaccatgctggctaggctggtctcaaactcctgacctcaagtgatcctccagcctcagcctcccaaagtgctaggattacaggtgtgaaccactgcacccagcccggttttgtttttaatctaggatataatagctatggattaaattcagtgatgagctggtaaatggttgacaaccaacttggggtgccacagtggggtgggggtagcaggaggagctctgatttgtaaccactgcttattaccataatgtgaatactcccacccattaccgatttcaagctaccaacttgatgtctgtcagccagcttgcaaaaatcctgaaaatgtaacaatcagctcttgtgaacagtatgagcctgagccagctccaacatacaaattctataaattcattaaggcactttttgaattacaaatgtctttgtacataagagaaaatgaaatgatcactagttacagaagatataattacatatgtagaaaaatctaaagtaattcatgtaaaattaatataagcaatacacaatttcagcaatgggactagattaaatagttatacaaaaattatcttctctcgcaaaaataattagttagcaaatgtgatggtgaagatttccccatcatagtagcaatgaaacaataacagcaacaaagccttagaatacctggaaatacatttaataaagaatgtacagtttctagaagaataaacatcagaaattcttctgaggggcattaaaaaactttgaaaaaaagggaaagatgtatgctgagatcttacaggaagactcagtattatataattattatttcttcctgaaatattttagaaatcaaatgcaatctcaattacaatcccaacaagatatatttagaaaatcaataagatgaatagaaagttcgttcatctaaaagaaaaaaacaaaacaaaaagaggtgaggctaggaaaattttgaaaaataagacaagagaaggctaatttttaaaacaacaagcatgtatttcagaaaaacaaaatacagttaattgaaaagaaaaagaaaaagcaaacagagagagacaggccagctcacctctggagtgcaagagcattcctcagccatgtgttcccttcctcttgtgaaccaaatggaatgaaagtgtggagggagggtgttaagtgactttctgagctgtgttttgaaatgtatttctccttagtaacaatgttataaacagtgccgaggttccaaggctagcccagttctatcataggttaggtacaggcttctaaggcatatcttataaactcaactaccaaatttaatatggatcccactgtatgtgttctagtctccaacttttggaatgcatcgttacagtcagtagggaactacttagacaactaagtataatgaataaagagtattttgagtgtgaatgtggcatgttatggcaatatgttcaatgtttttaattctctttcaccatagacttttttttgatttctcatttgcttatttgtgtaacttataagataattacatatttaacttagcattgtgagaaacaaaattgataacattgctttaatctcctgaatgtataatatgttcttatttctgaacagatacatttttcaagatatggaggaaataagcagtccaatctccactgagctgtatattttttcagatgtttcttctggagtgaatatttacgggctagatagaatttcttgaaaatagacatgtcacattcttgtttatatgtaacatttattacaactggcaagaaatgataatttaaaactaactttaaaaaatgagttcaggacaggtgcggtggctctcgcctgtaatcccagcactttgggaggccgaggtgggcggatcacttgaggtcaggagttcaagaccagcctggccaacatggcaaaaccccatctctactaaaagaaaatatatatatatacaaaaattagctggacttggtggcacatgtctgtaatctcagctacttgggaggctgaggcatgagaatcacttgaacccaggagggggaggttgcagtgagctgagatcgcaccactgatctccagcctgggtgacagagcaagactctgtcacacaaacacacacacacacacacacaggagttcagggaagtttagtttcgaactaatttatagcttgaatactttgaggtaatatttagatcaatttattattcactaattttgttgaaaatttatatcatgactattctgattccatctcaaggcacgaggttactctcagtggataaaaactcagctacagctgaggttattgaaatgccatgcatataagcatcctggctcattttcaatttgcctatgtatgtgggtagggtgtgtgtgtctgcatgcgcccacaatccttaaaattacgtggaatattaacaaataatatcatgcacatccgatgtttgtgcaataatattagagagaaagaagattattctctgagaccctccaagcatcttgctgataactagttttatcctttgacaccacagtttgaggccgcagcagcctgctgacactcaaacagtgagttagtgacaggctctgcagagaacagagcacttctctgtccacagaattccgggcaccaggacgaacacatatgcactgtagactttgagtatttttatatgactcagtataaatgtatacattcatagcctcatgagcgcatgtctgtaaatatggggtctcaatagcttcatgcattttcctcactagccagcgagttctctggcatacttaatcaatcctctactattcttggataggaagtactaaattgctgaggttttaacaaataccatgtttcacttaggcagtgtagaaattatcccagtataagtacattactatttttatgtttttgatttttaacttttattattttaaaaataacataatgtgtattcataatggaaacatataaaatgcagataagtaaaaagaaaaatatacctgatcccaccatgtggagataatagcaaccataataaatttgatgtatacctgatttagacttttttctatgcacttatatacatgcataaaatttttcacaaaaataaatcatatagatgtcttaaaaccttcaaaccctgcttttaaaatttaatataccataaatacctttcaatttccaacataatatttaatggctgcaagccaagaatattttagctgaataggactgggaattctttgccccaaagatcttacattaaattgaaacgtaatcatcccagggcctggcctcctgagggtaagttgtaccactgtggcatcaaaaggtagccaagaggcactgtttaaggtagctgggtgtctaggtgagtgtgtgcatgtgtgtatggtacttcacagtgtggaactgagctgagagtagaaagaggtgtgaactaaagccctgggccaggaaccaaagacaagtgtctgggtttggatagacccacactgccactgagaattctaaatttaatcccatcttccagataattttgaggcttacattttttaaggaaaaaaagagataatattttttatttagtagtttgctttcataactttaaaacattttggcacatgataggtgtattatccttcatttgtacttgaggcagcccctaaaaatgtcaggagcaggcctgaatacacagattatatacttcctaaatttctagaatgtataataattgttttatataataatttacctttctatatgaatgaaaaggagtattacatgagtgctcatttattgactggctaaggttcaatttaatatgatatttattgaaacttcaccatacaccatattctactgggtacaggatgagaggcaaaaatacataggccagacccttacaggactcccagtcttctggggacctcagactgtgaaataattatcccacagagtgataagtgcatcagacaagtgtgaacatggtacagagccacagagagaaaagagtggacaacttcagggtcaggaccctgggatcaattaatttatctggacaactatagcctcacagaaatctttaaaaagctgtataaaccattccatccaagatgagttattgtaagcctttgaaatagttgaacattttaaatttttgataaatttggtaggttggtcacttgacaaattgatcattcaggaattcacttttagtagatgatttttacctaatcagcctgtttctttgaggggctgatctcaaggtacattcatagaaattccgtccatgctgggatttaaaaaatacataggaaggccaagtgcattggctcaggcctgtaatcccagcactttgggaagccaaggcgggtgaatcacctgaggtcaggagttcgagaccagcctgaccaacatggtgaaatccagctctactaaaaatacaaaattagctgggtgtgctggtgcacacctgtaatcccagctacttgggaggctgaggcaggtgaatcacttgaacccaggaggcagacgttgcagtgagctgagattgcgccattgcacttcggcctgggcaagaagagcaaaactcctcaaaaacaaaacaaaacaaaaaaacacataggagtttgaatgggaaggcatgtggtcagttaatgagtaaaaatactctgtgaagagggaacagcacatgtgtcagcttggaggcacatcatggagtggcacattctgagaacagtaggtggttaaaattgctagaggactgaggtgaggaagcaaaaggagacaaaattggagagaaagacagggctacaacctggagggttttgtggtgctgggttccatggagttttatccaataggaaatggaagccattgaaggattcaaaggcaggaagtgagaacatcagactgcattttagacagaccgtgctggcaaaggaatgaaggatgaattgaaggggagtagtctggaaggggggagttcactgctgagaagggagcatccacaagggtcatgataagggcaaattctgaattcagagtgttgagattcaaaactgcttctatgacttagcaaatgtgtgtgtgggcaaagctggtttcctcatctgaaaaatacaataataatagctgtgaagattaaaagaaacaatacatataaagtgctcaaggaagagcctgccatatagctcttaatacatactagctattatttttaaaatgtaatataattattatatttaggagttcaaaagaaagatattgatggtcaggcagtggaggtgggtgtgggaataagaaatataaggagtggatttgacaggtctttttggcgattagattcaagatgaggtaggaggaatttgggaagacaggagcaagaacaagtgggatggtggaagataatgaattttgctttggacatggtgagttttagatacttttgggtcataaaggatatccagtgagcagattgatatgtaggcctgcagctcagtaaagagaagtgaaggccacataagcaaaatgccagggtaagaggttgatcagaaatagctgcactgatgtacaaatgctatttcatctatttggcccttgatgcatgacgtctgttagtactcagaagagagggcaccttaatagctttcttaggtgcaatctccactataaaagctttgcttatcaacccaactaggtagggcttctttactcttacactctttgttatggactgaatatttgtgtctcttccaccccaccaaattcatatgttgaagacctaatccccaatgctgtgttatttagagatggggcctttgggaggtaatgagggttaaatgaggtcttgagaatgggcccttggtcctatgggatcactgcccttataagaagagacactactctgttaacatacaccaaggaaaggccacgcgagcacacagtgagaaggcagctgtctctacaagccagaagagagccctcagagaaacgactctgttggatcttgatctgatgcttctagcttccagaactgtgaaaaaactttctgttgtttaagccacccagtctatgatattttattttattatggcagcctgagctgactagtatatccttgtataaggggttctttgtatttctcctatgggttggtcttttgtttcactctctttattagtatatgtttcttatcacttcttccaccttataggtagcttgaaggcaggtctttccttatacttatgttagcattccctgtggtgccctgcacaaggttttgcccaaaggagatgttcaataaacatttgatgacctcaagataatgcagtaatttctgtgaagaaggtcacagataacaagcttagggcaggagactaggcagcattcaagacttgggctcaggtagaaacggcaagatataggatttcaatgtgaaatttggagattagcaaggacagaggttctcaacaatgatcagtgagaaaagtgaaatggccaacatgtctccaagtaaggcatattcttttttgagtattttgcactttgcaagccattatgtaaaattatgttttggcttggctgcttcaaattaactttgaaaaaaaaattgtttttgagttacagtttgtctaaagcaaatgagtttaaaggctgaaatcgagaatgggtcatatccttaataattttatgtagtaaaagatatttttaaaagaactaccaatcaactgaaaaatccaaaaatccaacaatggcagccactgccccccaaagaaatgaaatgaaacaaaacaagcaaaacaaaaaatattttgtttattgcacttcaaactctagtttattgggaaccacttaaaattgacataatgttcttaagtggagattcaggggtgatgctgtgattctgtgtattttctgcgggatgccaagtgtgttctgggggtcatggtagaaaacagagagggactttgccataaatgtctcaagatatccctctgtgaggatagaagaagtgggggagatttatttatttattttctctggagcatccttcattgccatcttgctaatctcctgagtgctactggaaacaaggactttctagtatcaccagcgctgaagcccaacagtacatgggatgaaaatggagtaaagttgactctaccaacctatccacctaagagaaaccagcacgtggatgaatggatgtcacagcctggagcaaactcttagacttgtgttctccaataggtgagccactagagccacaattggctgtgagcattcaaaatttggtcagtccaaattgagattgagatgtgagtgtaaaatatgcactagatttcaaaaacagttaaaagaatgtaaaataactcattaatatttgcttattaattacatgttgaaataatattttgtatatattaagctaaaatatgttattaaa

SEQ ID NO: 978 - DNA, 3489 bp, Homo Sapiens
taaaaaaaaaaaaaatccagaaactaacccaaatgactacactcaaataacaccacaataaagcaaagtatcagcaaacttaaatgttggccaatagtattttctcaagtcaaaattaaaaaaaaacaaaaaataaataataaaaaaagcagatcctagattacctctgggattgtattaagcttcctgatatatgtataactggagtcctagaagaaaatgaaaataagaaaagggcagtcaaaatacaaacaatacagtagtcaaagtttttcatactgtaaatagatagataatattcgcagattttggaaactcaccagaatacaagcaagataaatagagaggaaaccattactgagcactgcccagtagaaatctgggaattgagccactgttctcccacagaatggtagattcacagcattaggagatatacctaatgttaaatgacgagttaatgggtgcagcacaccaacatggcacatgtatacatatgtaacacacctgcacattgtgcacatgtaccctaaaacttaaattataataaaaattaatttttcaaatttatctataaattcaaggccaccacagttgaaatcacaatttttttttgttgttgttttgttttcatttggctttttagaggcattttcaattctattctaagaattctatgaaaacaaaaatttctaaaacatctgctctaaaaaaggtggagcaaaacttcctaacccttaagtggcgtgggttacacatagtgacattcattcaaagtgtactccctgaaattaaaactctcaaaatctgggtacaggagaaacataatataataaaagccatatatggaaaactcaaagctagtatcatactaaatgggggaaaattaaaagcctttcccctaaaatctggaacataataaggatgcccactgtcacttctgttattcagcatagtactggaagtcctacttgaataatcagacaacagaaaaatacaaagagcatccaaattaaaaaataagaagtcaaattgtccatatttgccgatgacataatcttatatttggaaaaaaaactaaagattccacaagaaaacttttagatctgctaagcaaattcagtaaagttgaagaatacaatatcagcatacaaaaatcagtagcatttctgtatgccaacagccaacaaactgaaaaagaaataaaaattaagcttattaacagtagcccaaataaaattagtaacaaggaattaactaaagaagtgaaagatatctgaataaaaactgcaaaacaatgatgaaataaattgaagaagacacaaaaatggaaaaatattccatgtttatggattgaaagaaggaatattgttaagatgtccatattatccagtgcaatctacagattcaatgtaatccctatcaaaataccaatgacattctttatggaaatagaaaaaaatctaaaatttatatggaaccacaaaaaaaaaaactcagaatagacaaagatactctaagcaaaaagaacaaaattgtaagaaccactgtacctgatgtcaaatgatactacagagctatagtaaccaaaacagcatgttactggcatagaagcagacacatagaccactggaacagaatagataaccagaaaacaagtccacaaacctacagtgaactcattttcaacaaggtgccaagaatattcactggagaaagaacaatctcttcaataaatggtgctaggaatactggatattcataaccagaagacccatatgtttcaccatatactagacccatatgtttcaccatatacaaaaatcaaatcaaaatggattacagactttaatctaagacaacaactggatgaaactggagttaattatattaagtaaaacaagccaggcacaaaaacacaagcatcacatgttctcacttatttgtgggatctaaaaatcaaaacagttgatcctatagagatagaaaatagaacaatgattaccagaggctgggaaggggaaagaagggagggtgggggtggtgtggagatggataataggtacaaaaaatggaataaatgaatgaataaggcctagtatttgattgcacaggagggtgactatagtcattaattatttaattgtacattttaaaataactaaaagtataactggattgtttgtaacacaaaacataaatgcttgatgggatagataccccgttctccatgatgtgcttatttcgcaaaaatgtcttatgcaccccataaatatagaaagctactatgtacccacaaaagttaaatatttaaaaaaacaaagaacactgtattgaaagatagaaaaaaatgggtaaatttaaagtggaaaaacctgataattattacctcatccagttaatcaaggttagcattaattatgatgtcatgcagatagcatgggtttttgataaaatgtgatgagaatggcacttcacctttctgtccttcatatatataaaatatatgttttttaggattctgacaagtgtgtacatattttatatgattacatcttcaaaatctacatcccaaataaagaacattaaatatatatgtgtatattctaagaatgagaaaacatcctatacactcagttgagagacattttataaactagttggccagcagtctaaaaactgaaaattttccaaaacatgagaagtcaagaaaactatcacagtctacaagaggctaaagggacataacaaatagatgttatgtaacatcatgaacattatcctgaaacatgacaaagcaattagatacatctaaggaaatttgaataaagtatgaaccgtagttaaaaatgtaggtatcaatgttagtacattagttgtgataaatgtactgcacttatgtaccatgtaaacaaaaaattggggagtgagtatatgggaactctctattcctctgtgcaactttcctgtaaatctaaaacgacaatgtcaagtgctgctgaagatgtaaaacaacaaaaaaatatgttgcttggaactgtcctatagagtcaaatatataccaacaataaacccagaaattctagttggaggtatttacccaagaggaatgaaaacacacaaatatgtgtacataagtgatcagagcgactatgttaggaactttatacacattatcatatttagttattccaagatgcttgagaaaaaaagcaatcttatcgcattttctcagaaggaaactaaagacatgatgtttcaatccacgttcacgttgaaatgaagattttacacaaagattgtaaggtcttgtaaggtctaccataagcacaactttattccagaaggagaagagataaataatagggcaaaagcaatttttgaggagacaacgggcctaaaatttcacaactgataaaatacactaatctacagatataggaagttctaagaactccaagcaatataaatataaagaaaattcattta

SEQ ID NO: 979 - DNA, 2185 bp, Homo Sapiens
agagctccagttgtgtcttgttgtctgccaacgctaactggccagctctgacaggaggtgcgtggcccaggaggagccatcaggccagttctctgggatactgctgtgtctccagctctgcagtttgctcttcgtcactcagcggcagacggagaggcagacacgagccccttgtgagccctcctccttaccgtcatctcacaatgctctgaaataaggaggcaaatggctgaggtcccctcagttgtagatgtgattgagttctatctaccagaagcatatgcctcctggaagcctggttctaacacctcccacaaaatccttcaagcacttttttctgttccaaggtttgcttatgggggacccagtgaagtgcttcagagccctagagatttgctgagtcatatgaggggtcagcaaacttttcctgtaaagggtcagataataaacattttaagctttgtagactgtataaagtctctgtttcttctccccctcctcctcctctttctccttcagcttctttcctttaaatatgtacaaaacctttcttcttttccaaaatctgtctatatttgacctgtgagctgtagtgtgctgagtcctgcattagtaggaaagatcttgagtttcagaatgacgatgtaaagcagagaccctcctccccgcacccattctctgcaaccgacacttggattacttttcttttactctttgtctttctctgaagtatagatgtatggttggctttctgaggtcaaatataattaagaggtagccaaccatttggcaaatttgaaccaagaagagttctgatataaagaatgtaggacccattcactcccaattagtctcttcactgaaaggtggcttacaccaggtatatctcatttgctaatttgcttagtccatgtctagggaaccattgtgatcaagccaatatacccaggccagagcagcctgctttagaatcaaagctttaggctaggcgtggtggctcacatctgtaattccagcactttgggaggccgaggcggacagatcacttgaggtcaggagttcgagaccagcctggccaacatggtgaaaccccgtctccattaaaaatacaaaaattagccgggcatggtggcgggccctgtaatcccagctacagctacttgggaggctgaggcaggagaatcacttgaacccaggaggaggaggttgtagtgagctgagattgcatcactgcactctagccttgacaacagagtaagactccaccacaaaaaaaaaaaaaaaaaaaaaagaatcaaagctttaaaatccagcagaagtaaaatttccaagtgggagggaagaggatcaacaggagaatctgcaagagtaaaagaggaagaagatgtgtgctgcatggcacaaaatgaatctgcaaagcatctgggaactgcagaccctactgatgcctggaactcactggagtcagcatgtccaggcagtcattgtagcaagtcagagtggtgtgatgaaatgcttcaggagaaaaacatttcaccacagcctggttcactcagataccttgccagggaaccaacatctcactcgggcctctgatattgtaactgtgggcctttaagaaacaacggaaaacccaactgaataaaaactgacctcctttgtggctgccctgatggaaggggctcaggagcaacagccttcatggtgcccaccctctgggccagaacaacggatgccccacaactgagtttagtgcctccaagaaccacagcttttttttgcagcagtaagagcatacctctgaggcactgtgaagaatctgatagtcgaactgaatgaagccaagtccagtctttacggaaaaatttacacaacacttccaggtgggcagattcaaagacaggatgaatcatggttcagtgcagtggttcctggctgtaatcctagcactttgggaggccgaggcagggggactgcttaagaccaggaattcaagacaaatctggggaacatagtgagaccccgtctctacaaaaaattttaaaaaattagccaggtgtggtggcccgttcctgtggtcccagctactcaagaggctgaggcgggagggtcacttgagcccaggagtttgaggttacagcaagctatgatcgcacatcactgcacactagcctgggtgacagag

SEQ ID NO: 980 - DNA, 2580 bp, Homo Sapiens
ggaataaaatacagaatttagtaaagctgaaaactacattgttgaattagaagacaaatttgaagatattatttagaactgctttcctttgtcctgtcatttctctacaaagttattgttcttggttgaagatgctatatgagcaggagttttaagctactgctttgagctattctttgttgaggcttctcctgcatgatatgcactgcacgtattaataataataataattaattctcttgtgaatctgtcttttaccatgaggatctgtcccaactaagcactaaggataggtacaagtaaatttctgcctcccctacagtgggcagtggcatggggagccagagacactatgtgttccttctgcttgggcgtgggtgtcagatcaactggtgctcccacagcaatgggtagatggaggctatgcaggagctggtactctctatgggaaaggtcaagacagctggcagtgctggtagatgaggcagcatccagtagaaaatgggcaaatgatattaatagtatttcagagaagaaaacaaatggcctgtgaatgtattttaaaatgaccaaacaatatctgaaatcaattaatataatacacctcagcaattccactcctaagtgtatagccagaaggaataaaaatatatatccacacaaaaatatgtacatgaacgttcatggcaacattattcattatagctaaaagtagaaacaatctatgtgttgtatttctttataacattcaaatgatgaatggataaataaaatgaggcatatccgtacaatggaagattattcagcagtaaagaagaaggaagtactggtatgcactaaaacatgaataaaccttaaaaactttatggtaagttgaaggagccagtcacaaacaaccacatattgtatgattccagctataggaaatgtccacagtaagtaatctatagagacataaagtcatcagggcagaggaacttgagggggactgagaaataactgctaatgggtacagggttgctcttgggggtgatgaaaatattctaaaattgtttgtgatggttgcacagcctgcataaactaaaagccattgaactgtatactttaaatgagtgaattgtaaggtagacgaattatatcttaatgaagttataaaaaataaaaaataaaaagtgctcaacctcggctgggcgcggtggctcatgcgtgtaatcccagcactttgggaggccgaggtgggcggatcacctgaggtcgggagttcaagaccagcctgaccaacatggagaaaccctgtctctactaaaatacaaaattagccgggtgtggtggcacatgcctgtaattgcagctactagggaggctgaggcaggagaatcgcttcctcaccctcccaagcagctgggattacaggtgcgcgttaccacacctgggcaatttttgtatttttagtagagatgagttatcgccatgttggccaggctggtcttgaactcctgacctcaggtgttctacctgcctcggcctcccaaagtgctgggattacaggcgtgagccaccacgcctggcctgaccacttttcaatgtctgtagagaaatactgttagggtcccctgaaagccaatctaagtctgtatttccagccttcactcagttcttctttgtaaatatcctgcaggcacctcaaaatccacatggacaaaggttaattcaactttcccacatcctattacatgttctactttccctattccagttaaaatccaagctaggaagttcaaagccaccttccactttctcacctccaaacacttttgccatgtagcttatgtgagttgtctcgatttagcttgtttttttctcatttatcaggtaagcacctttcttaaatttgtggtgaaggtcaaatgagaaagcatgttggagaatgttccaaacagtgccttgacaggagcaaacgctcaggaaacagtggtggtttcatgatgatcccttgccagaagactgcatggactcctaatccatcttcctgggggcagtacctccccattttttccccttggttattctcttctctcttcagggccccagttgtgcacagtatataatcatttgtctgcagaacttttcctgtccttgcctcatcattgtgtgttgagtgtgttgggggcagataacttgtctttttagttcactggtttccagatggagagaaggcacatctgagcacacacagaaacatggggaaccgcatcccactacactagcagctgactgagatgactagaccctggactttgagcagatgccataataggatgtgcccgtggaggcggttgatgattagtgcagtttacatgtgagaggaatgcgaattattttaggtaggaggtggagtgtactagatggtttccaaatatggctgcatcagtatctccaatcccacaactctttgcaaggtgattttgccacttgtctccttaaaaggtggagtctaattcatctcccctagaatttgggctggctttgttacttgctttgaccaataaaatacggcaggtcttatggcttctgcttaaa

SEQ ID NO: 981 - DNA, 2788 bp, Homo Sapiens
agcgttggtacgtgctttggtgcagggcctcttctcgagcgctgatttccagggtgctgttccagatgccatatccaaaataaatgagcagacctgtggggcgaggggaaaggtacagataagtaaactgaggcccaaagaagttaagtaaatttcccaaagtcacaagacaaaggaggggcagagctgtgatttgaagttggtgctgtttgactccaaagctgcttcagttgtcaggatgtttacacggaagaagcactggaccagttatgctgggctcctgtttctactccatccctgtagattcagcatccttgtttctaaaataaaagtattacaccaaagactctcttacggatctcctaactctgaccctctaggattccatctgttatattgaactttgtagtattttttgctgcaaaatctgttgagcacagcttagcttttcttttacatcagttacaatattgttcagtattatggagatgctgtcagggatagtgaagctgtttgtctctacattaaatggcccagtctgttatttattttgagttcctatgtcagccctcctccccttgctttgtaaatgtagctttccatctccttccttgatgtcagactgtcagtttttacttcttgttgctgtcccagtgcttacctggagcagtcagactgcctcttttctaaattgctgcttccaacacctgatatttaaattgttagagtgagtctaaaattaagaggaaatggtctttgaagaaggcctgaagaactcttccatggggaaagtatagagtgtgcacgcattaaatacaagaacctgatgatattttcttggatgccgtgtgttttcagggttctcgggagttgagtttgcacatacggattaggttgctctttcagtgatgtgtgaggaaggaagtgaagatgcaactcacttccctgctttggtattggatccacagcattatccaattactcctatattctatgagcttattctcatcacccaactttaccacctgatattgtacaagatttataagtaaaatcttttccaaatgatgcttttgaagcaggcatcgatttgattgcaaatttaatttggagagccaatatttatggaatttgtgcaatcaaacattctctccataacattcgatctgacaaattaaatttaaaaatacccccattttgccaccagaatacacttgccaagggtaattagcaaatggccaagtcttcattaggtcttgtgaatggaccagtccattgctgtctgaatcagagaaagaggccctggctgtgcatggtataaggagcatttggaatcttagtcatttcccaaggtcctgctggggtcctaatgactgtagtttggggagaacactgggaaaatcaatcaggcactaaccatacaagacaatttctgcttcacgaaatcgttgttttggacacactgtaaaagatcttataatattttaaaatctttctgatttgtttgtatggagaaattcagacttagagtgggtactagagagcatctagcctggcattgaagctcactggtgataattgaatgtttacagcctcaaatatcctgagaaaaatgttctcattcaactattttaaaatatctggtatgtaagaggaacacatttaagagtatctttctaatttcaataagaaattaaaagcatggaaatggaattttattttatttttttaattttttttaaatttttttagatggagtttcactctgtcgcccaggctggagtgcagtggtgtgatcttggctcaatgcaacctccacctcctgggttcaagccattctcctgcctcagcctcccaagtagctaggactacaggcatgcaccactatgcctggctaatttttgtatttttagtagagatggggtttctccatgttggccaggctggtctcgaagtcctgacctcaagtgatcctcctgcttcagccttccaaagtactgggattacagcgtgagccactgcgcccggcgaaaccttggtttttatcctagattatctagggtcctagattactgagtgttgaggggcaagttaccctcttatggatgaaatgagacggccaattagatacagtttagggtcccttctgatgcatcattctttggttttacagctaaagtcaactcttaatcatctagttagtgagggaagccctgtaggaaatactgtatgaaccaatggttctcagtgaaggtggtactgactcctaggggaattttggaaatatgtgggagtgtctacggttctcatgatgattgtgggcacttgtggcattaagtggacagggacctgggctgtttatcattctgcaatgtgactgactcacagaatgaagctctgtcttgtatcatatatgactgctgatggccccagtggacattcatttaagtacaaacctgtttataatttttgaacttgaatttatctccattttacatatacacacaaagcatttttttttttgcatggctttttagacattgaattttccaggactgcaacagctgggtaaattgagagacagttgtctcttgtttggtttggaatttaccgacttgatcatcattttggaagaccatcatcaacaacaatgttattcatggactttgagcatcaaataactgtcctatatgagtctgcatttgtggcagttgtactcacagtggttctacaaatgactgcaaacaactgacgacttcgttgcgtctcctaatgtacgcatgcccca

SEQ ID NO: 982 - DNA, 10481 bp, Homo Sapiens
tctctcagtaatgtgttataattttcattgtataggtctgacacatttttctctaactctcactgcatcccaaatggaagggattggttttattttgcaagatatatacattaaaagtgatatatacattaaaagcaacaataactaccaagtgtacttttaccatcttttcctaaaaggacattttaatgccaaagaaacagatggcatgaggtcagagcagtaacagtggctgaaatctacctatttggcacccacgccggctcctgttctgaggagtcacgaaaactggaaaggcagtaaccctgaggccgacaaattccatgttagttctattccacctccagttcaccctgtattcctctcatctctatggcagacagaataatggcccaaagacatacatggcctgatccccagaacctgccacatgctgtctcacaggccaacagggactctgcagacgggaaggaattaagcattgacacggggaaactatcctaaattttcctgatgggctcaatgtcatcacaggcatcctatgaagtgaccacaggacctaagagggtcaaggtcagaggagagatagggagacggaagcagaagttggagtgcagcactctgaggacagaggaagagccatgagccgaggaatgcaggcagcctctaggacctggaaaaggcaggaaacggattctcctctagagcctcaggaaggaacgtggctctgcaaacaccttgattttgggcggtgagacccattttggacttctgacctccagaacgataacagatgtgcgttatttgtaagctgctgggtttgtggtgatttgttacaacccactttagggaacactgacccggaaggagggtgaggatagagaagccagagtcagcacagaggtgctgggaggcgggagcagaggaggggcgagctgtatcccagacagtaagaggggagagtgtttgggggctggtcaggctgcataagaaggcagagggacaaggccactgagttgggtggcgcagaagccaagtggcagccttgacaggagctgttccctctggaagaaaggaaggacccccggctgctgtggactgaaggcttttgctcgctttgcctcacctagatgccccctttctgctgctacatcccagcacccagcaggcactcggtacacacctacgatgaacacccgactgctctgactcttcaccctcccaccactggtgactccagcctcactgctaacactcccttactcacgggcccctctgctgctcgaggcgcctcagggcctttgcactggctgttcccgtggcctggaccactcttctcagaggtctctgcgtggctgcccgctgctcatcacccaggccccacacagcccccaccgggcacgtgagagtgtcaggtattgaaaggacaatattttgaagacattagggtcaacgagcagattatcaaaactaaattcacctgtttcttttcacttttttttttttttttttttttgagacggagtctcgctctgtcgcccaggctggtgtgcagtggcgcgatctctgctcactgcaagctccgcctcccgggttcccaccattctcctgcctcagcctcccaagtagctgggactacaggcgcccgccaccacgcctggctaatttttttgtatttttagtagagacggggtttcaacctgtttagccaggatggtctcgatctcctgaccttgtgatccgcccgcctcggcctcccaaaatgctgggattacaggcgtgagccaccgcgcccggcctcttttcactttttttaacgtggcgactagaacacgtaagatggcgtctgcggttcaccttacacatcctccctggagagcgtactctaaaccaggatgcaagcttcccctacagggcaagacaggaaatgcttccagcttctcaggctctctgtcatagtcacggtggcaagagtcagccacagatgacgtaagtgaatgggtgtggctgtgcaccaagacttcacaaacacagttgctgggctgggctgggcgggccccagacagtgagtcggcccatacctgctgtgtgaaagaatccaaacctggggccgggcgcggtggctcacacctgtaatcccagcacttcggcaggccaagattaggcggatcacctgaggtcaggagttcgagaccagcctggccaacaatggtgaaaccccatttctactaaaaatacaaaaaattagctgggcatggtggcgggcgcctgtaatcccagctactcaggaggctgaggcaggagaatcacttgaacctgggaggcggaggttgcagtgagtcgagatagcgccactgcactccagcctgggcaacaagagcgaaactctgtctcaaaaaaaaaaaaaaagaaaaaaaaaagaaataataaaaaaagaagaatccaaacctgcccagagagaggcctggcttttgccctccgccctcgggaagtcatctctgagcccttggtgtctcgcgcatgaggagggtctgactgcctggggccctcaggccagcccgacagcaagatggatttggggtggagtttgggccaggtggtatccttgagcttccggggctggaggctgaggtcagccacacagatcggggaggagtccccagtaagaacccgggacaccaagatctgaggagggtccctggctggcaacactccctgcgtgccgggaggagtgaagggagaggacagctgataactggtctccgtggagccttccgggccctcttcctggctgcttccagcgcgtccttctctgtgataagccgtgactgtgaacatggctggccaccgcctcctcccagcttagcggctgacggctgcacacccaggcctgcgtgtcggctggcagcgcgctcagaaactgctccagcaccagcagctccagcatctgctccttggtgtgcacctcgggccgcagccggtcccggcacagggcgcgtagcagccccagcgcctcgtgcgggcccggcgcctcgcccaggtggaagcggcggaagcggtgccacgaggagcccagcgccaggccctcggcctcctgcttcagcggcaccgtcagctccatggggcctcctggacggcagcgcctgccccgcgtggcccagggtgcaaagaggtctctgtgaggggcggcgctcactcgggcggtgaggaaagggtgtctgtctcgtgggatcccacggagtcaagtgccggctctgcccctcgttgggccccttccgcggcttctgtacctcagtcctgcagctcctcccgcagcctgtcctacagcacaaaggctctggagcaaattccagctctgcctcccaccagctctgtgtccttggacaaggtacaaggcaccttttgtaatacactgtctctccatgtccttggctcactctctcaggcgaggcctcccaagcctctttacctccgcgcacatgtgcacagagctcaccggaactcctcttacacatttttgattattcgttgctggtacctagaaatactatttttgtgtattgatccttctagccagtgactttgcagaatttacttattaattctagtagctttactttagatgacttagggttttccatgtatacgatcatgtcttctgggaataaaggcagcattatatcctccttaccaatttcaatgccttttctctcccttgccttgctgcattggctggtgtctccaatagagtgtcgaaaagaagtgccgagggtagacattcttgcacagttcccaattttagaaagaaagcattcgggctttcaccatcattaagtgtggtgtcaaccttgagtttgtcacttacaccctttatgaggctgaggaaattcccttctgttcctaaaatgctcagtttttattacaaatgggtattaaattctgtcaagggccgggcgcagtggcttacgcctgtaatcccagcattttgagaggcctaggtgggcggagtttgagaccagcctggccaacatagtgaaaccccgtctctactaaaaattcaaaaaaaaaaaaaaaaaaaaaaaaaaaagccaggcgtggtggcactggcctgtactcccagctacttgggaggctgaggcaggagaatctcttgaacccaggaggcggaggttgtggtgagcggatattgaggcattgcactccagcctgggcaacagagtgagactcgatctaaaaaaaaaaaaaaaattctgtcaaatgctttttctatatctgttgagatgatatgatggtattgacaggggttttccccttcattctgttaatatggtgaattacattgatattaaaatattaaaccaatcttgtaagtcagggaaaattgacacttggttatggttatatatatatatatcttactggatttgatttgttaaaattaaaaacttttctttttcgaaaccactttattggcctggtgcagtggtgcacgtctgtaatcacaggactttgggaggctgagttggagaccaacatggacaacatgacgaaactctgtctccactaaaaatacaaaaattagctgggggtggtggtgcacgcctgtagtcccagctactcaggaggctgaggtggaagtcacttgagcccaggaggtcaaagctgcagtgagctaagatcccaccagtgtaccccagcctgggagacagagcaagaccttatctcaaaacaaacaaacaaaaaacaaagcaacaacaacaacaaaaaagctgctgcagtggctcacgtctgtaatcccaacactttgggagcgtgggggggggcggggggggtggatcacctgaggtcaggagttcgagaccagcctggccaacatggtgaaactctgtctatactgaaaatacagaattagccaggtgtggtggcacacacatgtagtcccaggtactcgggaggctgagacaggagaatctcttgaacccaggaggtggagactgcagtgagctgagattccaccactgcactccagcctgggcaagacagagcaagactctgtctcaaaaacaaaacacatacacacacacacacacacacacacacacacacaaccagattattttattgagatagaattcatatgccatacaattcaattcacccacttaaagtgtacaattattttagtatatcgtcagatacacacaactatcaccacaatgatttttagaacattttcatcacctcatgaagaaatcctatacttttctctttattttgagacagagtttggctcttgttggccgggctggagggctgggattacaggcgtgagccaccaccgcacctggccagaaatcctatactctttagctgtcactgttgaccctctctccccgaggcataaacatccactaatctaccttatcttcagagtttactgtagagattttattaaatgaaataatataaaatgttatctttgcgactggcttttttcccttagcatgatgttttcaaggctcatctgtgttgtggtatacagcagtacttcatttctttctcgatttgaataatgttccattgtatgatctaccacatactgttcatccattcatcagctgatgggcatttaggctgttttcaccttttatctattgtgaataatgccattatgaacattcctatacaagtttttgtgtgtacatgtgtttttattaccttgggggtatgtatctgggaatgaattgctgggtcatatggaaactctgtatttaatcaatgagagaactgccagattgttttccaaagtgactgcaccaatttatattcccatcagtcatatatgagggtctgatttttgttttctcaccaacacgtacctttttttttgacacagggtctcactctgttgctcaggctagactgcagtgacatgatcatggctcactgcagcctcagccttcctgggctcaggtgatcctcccacctcagcttcctgagtagctgggacttcaggcacatgctaccacacccagctaattttttaacatggtttagagttaactgtttacttcctgggagtggggaaattttctctttatcaaaagttggccctaatattctaagagttataggtaaatgtgaatcaatatgtcagttccccatctccccgctcatctttcttaactttgtagcttaatgacatgaatatacagagcgaacagactttggtctaaatatcaaagtttattgaaataaaatataatctataataaaaaatactacaggtgttattcactggttacagttttaagtatattaacaaaaacagccaacattttaacccaacaatgacactatctttgtggtacaataacaaacatgaaagtaaatgttgaataatactgaataattctgtcagaaatattttatactttaccatctatgtatgccttttaaggaatatcctcccaaagtgaaagttttgaaactgatgacattgtttttaagaattaagtagttttaaaataattagtatttaaaacaaatttatttcacagaaattcagttcaaccctaagctgggtagatggttttaggtatctttatgcaaaaaatgtatttcaatgctctttcctatgaatctctagggttgttattattcctcaattgaaattaaagctggtcataaagcaaaacagatgaattatttcagaagtaaaatgggtattaagataaaaaatgaaaggaggaggaaaaaataggcactcatacgtaatctatatattaaaacgctttgagaactcagtagccagtcttggcctggcacaaagagatctttgatatgtcacagcaaattgacccaattagtccaacaataaagtggagaaagaaaacttgtttctcttccttgctatatttcaagataattttctctgtagtcattataccattccacttgctactcctcaaaatatgtgcctcaatccaattattctgcacaattcaaggaaaagattcacacgcactagctttaggaaatgactttcagggtacctctgaagtttcacaagcaaacatgattccttttgctgactgttttgtagcattcacacaccaatctcctgttatactgtcctacttgtaatgtgtgaatctgtaacaagctgtcatttattaagcaagatagtcttttaacaaaaacctctgagggcttttcaaaacctcatctttaaaaatctgtaaaacaaagataccctatgtaccctgaaaaaactgcttatttcacatatgtgaaaaacaataataaaaattctgacaaaattgagagacatacaagacaggtcttcaaggattaaatactgtttgtcttaaaacatgttgcaattatgttcacaatgtaaggttcattaaaaatttttaaaaaacacattgcattagttagaactgctttgtaaggtatttcagttacaaggcctattttgacagatcactgatttgagaacttaaatgggaatttcagtttcttgacttttttttttttttttttttgagatataagagtctcgctcagtcgcccaggctggagtgcagtggggcaatcttggctcactgcaacctctgccttccgggttcaagcgattcttgcgcctcaacctccccagtggctgggattacaggcatgtgccccaaagtgctgggattacaggcatgagccaccgcaccgggccagtttcctgactttttattttcagctataaaacaattatgagagccaaaggagccaggatcaccttccaaaacattttgttttgtccttctctaatttatgaggcattctttcttctcaaagcaggatattacagtgcagattaaaactggatattaaagttaatggtgacaaattattaagtagtttgaagaaatccttagaatatcagataaagagagacttaatggcagaagaagaagtctactggggttcaaagcttaggttttatatttctgccatggtatctcaacactttctctgggatagtacgatgccctaaaaaatacctgtgttaggcagacaagtctaaatctcctttctcaggacaataggacaaaactgaacttgaggcaatagttgaagaattttaccccgtttttcaagtttaattttcttgagatcagaaaagtaaaattagaaagtagaatccttcatgtaaaaaaatatatgcgtatcacaatttattaaactctaacatctaagagcaaaaacaccaggattaagtaagaacatgcatgaactaaaatttagatagatattcaaagtaagttaaatttaccagagtcctgcatctggcctctcccatgccattatcgctattttgcaatttgttttgttcaggaagcctctgattttaatatttaaagtgtcacctgagaagagtaacctcaattcttcatgttttctcaacaatcttagaggtgttggacatcattaataaaatatactaaattatcagagaacttaagaacgctaagattctgatgagttcctttaccattttcagtcactttctaaaagggatttaacttcacattatcaaataacattttacactaaaaacacaatttatatagccctaaaataatattacttgagagatctaaatgaattccaccaatgcaaacgaagtttatatactgtattagtaatttgataccaccgtattccatggagaaaaaggcaaagagaatctaaatatttagatctgtgaaagatactagaaaaaaatagatttttaaatgcttctgatcctctcaaaatactcttgattttgactctatagtctatagaacacacaaaaaactgtaaaatgcatttgggaagagatcacgccatactcaaagaaaattctacaaattttgacagcattaaaaaaactgacttaagatatattttgttattgagaaaaaagtgtgcacattcaagaacataggatgtgtaatatttgtgataaattaagtcatactttgtgcttatactatgccctttattcaggagtgcaaaacacttaatcaaaaagagcatccttcacatatttaaagagtacattgaggcacagaaagtttgcccaaggcaagatagaaagtcgggtttatagacacaaaatgatctagaattcttcatgtccaattccttaaaatacaaactgtagactatttgtaatgcctccatcttattttatcaaacattagtaattttactattataagtttatgcataagtactgtgtgataggtaatgcccataaggtttttatcatgttttaaggtaacttgtgcatggaataggaaaagttaatcaaatgtaatcaattcgcttttgctttttaacaaaacttaaataaatgagctatttgaggacagttctggaaattcttgccttgatttttctccaagattttagatatgtagttcacatgtgaacattaatatatgaacaattattttatttattggcctctagttctctttcctctcatgatctgtctcttagtgaattgactttctgattcattgaaagcaaaatgctaagaaggttttgtgcaagtgcaaaatgtttaatcttgggttcagtcaactagtctctgatactaacttgcttagttaagccaagatcaagaagtatgagaaagaacttgaaatatgataaagaatttgaaacagaatatgggataagtagtcaatatcagaaatgtgagacaataaaaacaagatatattccaaagcctaatcctaaatttaaatctacacttcattcaactctgaacctgaccttgaaacatggaagaagttactttacctaagcacactgcaccagtgtaaaaccaatgccaattttagctgctttatactgcttaatgtgtatatgtacacatgtattcttaaaatggtgattcttaaattgaagttctgaattcttttgagaatctaacagaggtcatgaaaacttgcttcagaaacacacatatgtaaagtacttttaagtgttgatcatgtactataaatcacagcattgtggatgcaatgggattagacatgaagaaaaattttatatttttaataaagactggttactaaccttaaggaatatacttagactctgaaagtaaaaggaaagtgcaatgaccatatttgttcattcatctgcctattttcaaatctaatgatgatttggttgatgcaaatatgtccctaatctaggctataaatgataaaaacaaaaatgtttaagttctaacttttgttagcagtatacatctaagaattttcaagtattacaaaatacttggaaggaaagactttaatataccactttcaaaatcctatgtacccaaaccagcaatgaagtggtgggatatataacgttaccttgggcaaaatttaagaaaataaagacacaatagctctaattttttttttttttttttt

SEQ ID NO: 983 - DNA, 1480 bp, Homo Sapiens
atgctactcatgcacagtgctgtagtcctggggctaccatcagcctgcagatcaggtcaactccttcaaggctctgcattagggcctgctctaccaataattcatttcagctccagcctcaacttgtctggtgttaactcaggcactaggggatggacagtcatggagaacttattaagcctctgtgcagggtcagcctatcatgactcttaggtgtagggctgctcaggagtcaccaagcatatacgctaaggaagaagtgagttcacacagcagccctgacactgggatgtgggtgactgtggcctgtaagatctttgatgtcagaatttgtacacctacaccaagcaggaggcatcaaaactgacccttacactgatgattcaatgcatcactcaactctgaaagtcaacagctaggtcttctttaatgcagaggccccatcatcatcccccaccccacaccctctccagctgcttatggaaaattacatcaaacccaacccagtcttcactcagaaccatctgcctgtacctagcctggacccaagcaccttttgcctgcatgtagtagaggtaccattgggtcagcagctgttcctgttccaggagaaacaggagttcaagttccctaagcaccggatcatactctgcagcataccagcaactggtgctctgagatgactcacgtcaaagaagtaaaaagtctggagtggaggatagttatcagcactgcacatgggaatggggcacagctctgtaatatgttagccttggctggtcatcagctctgtgaaactgaggcccatgtctgctttgagggagtagactctgaccccactgggactgcatatggatcattcctctgtctcaggccatagactctgaagctcagtggcatatgaggtaaatgggcagcctctgcctggtgaccataccctccattttgggtggtggttcccactgtggtgggtgcacactctgtcaaatggctgggcaaagtgaatgaatgtggagccagaagaaagatacagccactggcaacagtgggataacaaaagcttctttccacatgtggactgggacactgtaggttttgacttggttccatacattcaggaacttcttggccattgcagtaccctaaaggagggagactacagagttaggggaggtgaccaacaagggatatacatgaagtggtggtggcagggctattatctgggggtgtgagtctctaagtgggacctaacctggcaggtggctgagctggatggagattaacagtgccacaagagggcctgggcctggtgtctatggcagccgtaagcacctgtgccagataggcagaggaattgaacattgtttgcaaggctgtggatggcagctatgatgtgcagctatactccagtgtcccaatctggagcctctgaggtgtgctcagcaatgtctggcactgtgtccacatccatgtggcccca

SEQ ID NO: 984 - DNA, 10031 bp, Homo Sapiens
acagtagggaaggtgcggagcatgatggtgctctgtaggagcgcagacgctgaaaggcgcgctgctgtggctgggagaagagcggagccaggagtttgttcccaatatcttagtgctatggcaaaagaagggggaggagtaattgtggggccccccacacacccgctgcggcgatacactcaccctcgccaaagtccttccggaagtctaagttcgaagatggcgccgcctgtctggtcgcggtcttatgacgaaatcttgttagctgctcttcactgacgcccccaccccagtgcacaaggtaaacacgtgtgcttggtccggagtcggtgccgggctagttttctcttagactctgtattccataatgcagcgcggccagagtcaccgagccctccgaagccagccgagttccagggcgtcttcagcggcgccagggacgctgcagggcctcatgggagttgcagtgtcaaaaaggggagatcgacgcctgcgcggccaacgggatcccacgcggcctcgacgggagccgggagtaggcggactcccaggccgggctcgcgctctggatccctgaatccggcctttccggccggactgccgcgcctgtggccggaagagccagctagaccagagagtctgtacctgcaaccctggcggcgtccgagcccaaggcggagtctgggagacaaagaagtcctcgccgccggccgctggaggattctgccagtagtgaagtcagggatgggcccgagagagcttggaaagaggacaaggaagggaaggagtaggagtagaaaagcatgactttggctgggtatggtagctcctgtctgtaatcccagcactttgggaggccaaggcgggggaggatcacttgagcccaggaattcgataccagcctgggcaacatagtgagaccccgtttttatttttatttttattttttcctgagatggagtcttgctctgtccccaggctggagtgcagtggcgcgatctcggctcactgcaaactccgcctcccgggttcaagcaattgtcctgcctcagcctcccgagtagctgagattacaggcgcccgccaccaagcccggataatttttgtctttttagtagagaaggggtttcactatgttggccaggctggtctcgaactcctgaccttgtgatacgcctgcctcagcctcccaaagtgctgggattacaggcatgagccaccgcgcccggcctaattttttaattttttctagagatggggtctcgttatgttgaccaggctggtcttgaacacctgacctgaagtgatcctcttgcctcagcctcccatagtgctgcgatcacaggtgtaagtcactgagtttggccattattccatttctgtacacaaaaacctttctcattctgtgctataactagttagcatttaattgggtggatgtggtataactagtgccttgttgatattgatgcatatttacatggttttgctgttataaacaatggtcccttgctattataaatcacactgctataagtaaccttgcatctaaattacttcaaatgtgtaactatatgggtaggataatttctagaagtggaattgtgaaccaaagttttaggtgcatttgtaattttgatttataaccaatcttttcactgatctacttctctgcctctaatttctactaggtgtttgtttgtttgtttgtttgttttgagacagggtcttgctctgtcacccaggctggaggacagtggtgcaatcacggctcactgcagcctcaacctgccacctcagcctcctgaatagttggggtgtgtggcaggtgtataccaccacttccaggtttttttgttgttgttgtttaatagagatgaggtcttgctatattgcccaggcaggtctcacactactgagcgcaagcgatcctcctgcctatgcctcccaaagtgctgggattacaggtgtgagttgccatgcctggcccggttatctttctaaagcataaagcaaccctgttgatcctctgcttaattttgatgattaagtagtatgttcaaaatatagaaatccatgtattgataatgatcttttaaaaaaagtaaaagccaaaatatcagctactcatcctacaccattgaaagtagtgaccattaaactgctctacctctacctccacctctctacctctctacctctctacctctacctctacccacggtctccctctctttccatggtctccctctcatgtggagccgaagctggactgtactgctgccatctcggctcactgcaacctccctgcctgattctcctgcctcagcctgccgagtgcctgcgattgcaggcacgcgctgccacgcctgactggttttggtggagacggggtttcgctgtgttggccgggccggtctccagcccctaaccgcgagtgatccgccagcctcggcctcccgaggtgccgggattgcagacggagtctcgttcactcagtgctcaatggtgcccaggctggagtgcagtggcgtgatctcggctcgctacaacctacacctcccagccgcctgccttggcctcccaaagtgccgagattgcagcctctgcccagccgccaccccgtctgggaagtgaggagtgtctctgcctggccgcccatcgtctgggatgtgaggagcccctctgcctggctgcccagtctggaaagtgaggagcgtctccgcccggccgccatcccatctaggaagtgaggagtgcctcttcccagccgccatcacatctaggaagtgaggagcgtctctgcccggccgcccatcgtctgagatgtggggagcgcctctgccccgccgccccatctgggatgtgaggagcgcctctgcccggccgcgaccccgtctgggaggtgaggagcgtctctgcccggccgccccgtctgagaagtgaggagccaccccatctgggaagtgaggagcatctccgcccggcagccaccccgtccgggagggaggtggggggtcagccccccgcccggccagccgccccgtccgggagggaggtgggggggtcagccccctgcccggccagccgccccgtccgggaggtgaggggcgcctctgcccggccgcccctactgggaagtgaggagcccctctgcccggccaccaccccgtctgggaggtgtgcccaacagctcattgagaacgggccaggatgacaatggcggctttgtggaatagaaaggcgggaaaggtggggaaaagattgagaaatcggatggttgccgtgtctctgtagaaagaagtagacatgggagacttttcattttgttctgcactaagaaaaattcttctgccttgggatcctgttgatctgtgaccttacccccaaccctgtgctctctgaaacatgtgctgtgtccactcagggttaaatggattaagggcggtgcaagatgtgctttgttaaacagatgcttgaaggcagcatgctcgttaagagtcatcaccaatccctaatctcaagtaatcagggacacaaacactgcggaaggccgcagggtcctctgcctaggaaaaccagagacctttgttcacttgtttatctgctgaccttccctccactgttgtcccatgaccctgccaaatccccctctgtgagaaacacccaagaattagcaataaaaaaataaattaaaaaataaaaaaataaaaaaataaaaaaaactcattaagctctaaaaaaaaaaaaaaaaaagaaagaaaaaaagaaagtagtgaccaattcctgaaaattggcaaaaaaaaaaaaaaggcaagagtaaggcatttatcttgtctttccagtatgaactctagttcaaaataactgatgagaggaaggttttgtttgttttttgagactgagtctcactctgtcgcccaggctggagtgcagtggcgcgatctcggctcactgcaacctctgcctcccaggttcaagcaattcttgtgcctcagcctcctgagtagctgggattacaggcgcccgccaccactcccggctaatttttgtatttttttagtagagacggggtttcaccatgttggcgaggctggtcttgaactcctgacctcaggtgatccgcacacctaagcctcccaacgtgctgggattacgggtgtgagccattgcccagcccgggatttttttttttttttatagattaacagctagtaattgtgcaaagaatgatagaaaaaaatcactattttgcatgtcccagtgaaataattcaggcaacaatcaccagtggatgaaatccctaaagagcttttaggaagctttaaaatgcctggacccactcatcactgaacatgaaaccaccagtcattgtttgcctcctgatgtgaggcaatataaagcacacagaaccacttattaaacattcttgcccaaaaaattgaataggaatacaggacttaggggccaggcgtggtggctcacacctgtaatcccagcactttgggaggccaaggagggcggataatctgaggtcaggagttcaagaccagcctggccaatgtggtgaaaccctgtctctactaaaaatacaaaagaaaattagctggatgtggtgacgcacacctgtagtcccagctactcgggaggctaaggcaggagaatcacttgaacctgggaggcagaggttgcagtgagctgaaatcgtgccattgcactccagcctgggcaacagagcaagactccatctcaaataaaaaaaaaagaaatacaggacatagggaatgagtgaaatgacaacataagaaagcaaacagtcaaatctagaatgcagaacatttcatatgacaatcaacatggcttctgtaagccaatgtcaatgtaaaaaggggataggagactgctcttttttttttttttttgtttgtttgtttgtttgtttgtttgagacagagtctcactctgtcgcccaggctggagtgcagtggcaagatctctgctcactgcaaggtccacctcccgggttcacgccattctcctgcctcagcctcccgagtagctgggactacaggcgcccgccaccacgcctggctaattttttgtatttttagtagagatggggttccactgtgttagccaggatggtctccatctcctgacctcgtgaactgcccgcctcggcctcccaaagtgctgggattaggcgtgagccaccgcgcccggctgaggagactgctttttaaaaaatgtaaccaaatgtaatgtgtggatttgtttggatcttgagtcaaactaagtcatttttcagccaaggaaatttgattatggattgaatactaagaaagtatgatttaataagtgatattatggtaaatttccatatttcttaagagacattgaagttaaaggagtgaaatgatataatgcttggatttgatttaaagtaacttcatcaaggaaaaacaagaaggctgagtgctgtggctcacgcctgtaatcccaacaccttgggacgctgaggcgggcggatcacctgaggtcgggagttcaagaccagcctgaccaacatggagaaacccccatctctactaaaaatacaaaattagctgggtatggtggcacatgcccataatcccagctactcgagaggctgaggcaggggaatcgcttgaatccaggaggcggaggttgcagtgagccaagattgcaccattgcactccagcctgggcaacaagagcgaaactctgtctcaaaaaaaaaaaaaaaaaaaagaaaaaagaaaaacaacaaaaagagaaagtaaatgtggcaaatttgataactgttgcatctggtcatggagattctttgtatagttctacttttacgctgcttaaaaatgtttgataaaaccaacatggcatatgtatacctatgtaacaaacctgcacattgcgcacatgtactgtagaacttaaagtataaaaaaaaaatttgataaaatggttgggtgcagtggctcacgcctgtaatcccagcactttgggaggccaaggcaggtggattgcttgaggtcaagagttcaagaccagcctgacccacatggtgaaaccccgtctctactaaaaatacaaaaattagctaagtgtggtggcaggcacctgtgatcccagctacttgggaggctgaggcaggagaattgcttgaacccagaaggcagaggttgcagtgagccgagatagtgccattgcactccagcctgggagacgagtgactctttctcaaaaaaaaaaaaattcaataacacacatatatacccaatagataactcttcattttaagctaaccagtggttggactcacagtctggccccaacttacctttgcagtttgatcactcaacaataagactcagttctagcctcactatactatgtgacacttttacattggccactcactttaaggcctattctttgtgttcaagctgtttcttctttttttttcttccctaactgggcaattacttatctttcaaggactaggttagatgtgacttgtaagttttcaccaatcttttgttcatactactactgggttacctcatactgtagatactatcttcttatgccatggtaagcgttccttaagggaatatagcacaaaagttaagggcacagtttctagatccagactgcctgaggtcacatcctggtttagctactgactagctgtgttacctagggcaagtaacttcatctctctgtctgccttgggtaagtaacttaacctttctgtgtctgagctgtgttgccttgggcaagcaacttaacctttctatgcttccattatctcatctgtaaaatcgcatttacttcatagagttgtattattatttttatttttagagatggagcctcgctttgttgcccaggctggagtgcaatggtgccatctcagctcactgcaatctccatctcctgggttcaagcgattcttctgcctcagcctctggagtagctgggattacaggcatgcgccaccacgcccagctaatttttgtatttagtgtagagacagggtttcatcatgttggccaggctggtcttgaactcttgacctgaggtgatctgcctgcctcggcctcccaaatgagccactgcgcccagccttcatagagttgtattaatcttcctaaatgggtaagaaagggttcagaacagtttctgacacacagttaaatattcaacaaatgctaatttataaggttaggactctctttttgagacagggtctcactctgtcacccaggctggagtgcagcggcacaatcatggcttactgcagcctctacctcctggactcaagcaatcctctggcttcagcctcctgagtagctggaacaacagatgagcacaaccatgcccagctaatttttattttttgtagagaccggattgccatgttgcccaggctggtctcaaacctctgggctcaaacaatcctcctgccttagcctcccaaaatgctgagattacaggaatgagtcactgcactcagcccaggactatttgttttcatattcctcctcacacccagtttagtgtctggcatgtagatgctcagtgaatgattgatttgggtagttttggttctttatacgggtcttcaggttagtcccaatgtactggcatggagctagttacttgagcaggtcttcacaaaggtctgagtagcaggtgataaaaggggttgtgaagtctggactcctaacttaagtggtggagatgctaaaagagaaacaaaggcagcagagttgctgagggtagggagtatggcatttattaaccctgtgtttcccccgtcactggtcactgctcttgactcgtagaacaacaggtacagaactgcaagggatcatccccagctccgtgatcaccagatccacaagctctgggggagtcacatcatagactagattcaacaaccgtagggatgcgtggttctgccagttagccagcgcaacatgttctccccgcttacattgcagatcatcagggtcatctgcaatggaaggcgtacccattatgttctttcagaaaagaagttctagtttatccgcccctctccctccctctcaagtcttcacaggtagctggaggcttctcttttgcctccttacctagctcattagagacaaaggcatcagtctgcacacgctcacagaacttgtatgtttcacagcaaaccagcactggtacattatgggctcgagccaccagggctaactgtgctgtccctacccgtgacatcacagacccgttggccaagagtgcatgagctcccaatagcaccttggaaacctgtttcacaggagaagaggaagaaaaaaatgtcattgttgtatcaatgcaaaataaggtcccctacttacaggacagcaacattaagacaagtaataaatctcaacacctgtgaaaagaagggaaagaaacaaaaacagacaacaagtaataaatcttttttttttttttctttgagatgaagttctgctcttgttgcccaggctggagtgcaatggcgcgatctcggctcaccacaacctctgcctcctgggttcaagtgattctcctgcctcagcctcccgagtagctgggattacaggcatgcaccaccactcccagctgatttgttgtatttttatatttttagtagagacggggtttctccacgttggtcaggctggtctcgaactcccaacctcaggtgatctgcccgcctcagccacccaaagtgccaggataacaggcgtgagccactgagtccggcaattaataaatcctttttttttttttttttgagatggagtctcgctctgtcgcccaggctggagtgcagtggcatgatctcggctcactgcaagctctgcctcctgggttcacgccattctcctgactcagcctccagattagctgggactacaggcgcccaccaccacgcccggctaattttttgtatttttagtagagacggggtttcactgtgttagccaggatgattgtgaactcctgacctcgtgaactgccctcctcggcctcccaaagtgctggaattacaggcttgagccactgtgcccggcctaataaatcttaatgatggcttttcttctgtgaaaacacctgaccactgacccaccaaatctcccacaggaaaagtaaactttgaagttacttttgtcttgttccctcttcctggttgctagtttaatgtaatgtttttgcaatagctagactgctgtaatatactgtcagtgtttttccaattaaatagaaacagagctatataattattttttttgacacagggtttcattctgtcacccaggctggagtgcagtggtgcaatgacagctcactgtagcctcaacctcctgggctcaagcagtcctctcacctcagcctcctaagtagctggaactacatgcgcatgccaccatgcccgggtgtgtgtgtgtgtgtgtgtgttcaagcagtcctctcacctcagcctcctaagtagctgtgtgtgtgtgtgtgtgtgtgcgtgcgcgcgcgcacgcactcaagcagtcctctcacctcagcctaagtagctggaactacatgcgcatgccaccatgcccggggtgggggtggggtggggtgtgtgtgtgtgtgtgtgtgtgtgtgtgtgtgtgtgtgtgtgtgtacagggtctcattatgttgagcaggctggtcttgaactcctgggctcaagtgatcctcctgccttagtgctgagattgcaggcattgagccatggcaccaagccagggctatataattctaatatttttaaataattgtggctgggcacagtggctcatgcctatgatcccagtactttgggaggccgagacagggggaactgcttgagcccaggagttccagcctgggcaatgtagcgatatcccatctctacaagaaaaataaaaaactagctgggcatggtggcacacaccagtagtcccagctactcagaggcggaggtgg

SEQ ID NO: 985 - DNA, 58139 bp, Homo Sapiens
attaaagcctctccggtatctgacacaagtcagaatttccactgttccagctgagcttttatgaggagcagacttgagagaaactgccaagattttctggagtacacagggcacacggccagctgaacacccgcttcccccactcgctgctgctgggaagagagcaatggactccgaataccttccagccgaaagtcgtcctcctcttcctcgctgagcgtgtctctcaacacgtcgcccacgagctcctacaagaagacagagcagaggcattgagcaggggttgggggagcccagtgctgggacgttaaaagcagtgccatgaggaccctgggctgattcttctgattggaattcaggtcaactgaggcagatcctattgcacctgaaaagttaagtgccaaggtgggtccctcctgcccttaacataaacccacacgcatcagcacaacattcaggccaccacaggctatggctccactgggtcttccatcatgcctcccacatttcaccaacacacatgccttccggaaaccagcctgattccttgcacacaccctgcctgttccccaccagtgagttaaggatatctgggatctcatcccaaccaacctgaccaggagatgtcaagttagcgaggggagtgttgctggtccacaggctgggaaatttctaggatgtcaacaaaggccccatctgtctgacccaccctagcaggataactccaaatatggaagaagctagaccataccttgtcaaactgtcttctgtatttattggtattctgccagaagagttctatgatcaaagaagattcttttaaacaaagttaaacaagatctcttacagcaggacttatcaggacttttcctatggttctaaacactgaatctccaagtgctggcatattttgcattctccaaacttatttagaccatggagcttcgtttttcaaaagtatcacatgatacgcgtgtcccaagaaacccactttaggaaatactcctgttatgggaggacagacaagggtttgggggatgatgatgctatggtagcggttctcaaaacacaaaatgacaagcaataaaaaagcccaaactcagcagctgtcaccaacttctctttgtgaaaataaaagagaaaaaaaacaaaaacaaaaacaaaacccaaccctctccttaggggaaaaaaaattctacacctcagatgatgcttaaaaaaaaaccagtcctcttcttgatgaacaaaagaaaaaacacggctttgtattgctgatctcatcaactggacacagctggaggtaagcctcttgcttttttttgttttttgttttaaagacaaacagctaacattttgtggctgttctctttcttctttcaaatctttctagggcattacacactctttcttaaaagctgttaaaatgtggccattcagactccggtgtcccatttacttcaaaaccaggctactttattcctcgagtcaggatggcttcctctcctcctccaccaattattataatcatcgaacatatcctgggcttgtaaactggctgtttgtgttaacagagcccgagttgacaggggagctgggagacgatgacaggaaagggatgcacacaggtggcatcattagatggctgggacgccccagcagccaattgaagcccatctttcatgcagaagagagacgggtgccaccgccccctgaaaggctggtaggcagagcttccccgagggaacaggcaacagtcttcaagagaatctgcgcacctcttcatgctgaggtcttctgcagagcggggctctgcgcctgccaccctgactgcactgcagccgggtgacagcatcaatgagacgtctgagtactcgtgtctttttactggcacacttggaagagtttaaagactccagacatcgccaccaacaaggcagccgtgtgggaccctatgacaatgaccgcatgtgctcaaggcaccccagtcaccacctaatgacagcttcagcactccctgctcggagaaccaagctctctgacacactcagaaagcagagttctggcaagttctggcataggcctctcaccactcaacagtaccctgctctggagaacactggaaagctccccggagccatggttcatggacgcactgtactgtgccaatgctcaactttgcaaaaattcatctccccagccaggcgcagtggctcacgcctgtaatcctagcacttcgggaggccgaggcaggtggatcacgaggtcaggcaacctggccaacataatgaaaccccatctctgctaaaaatacaaaaaattagccaggcgtagtggcaggtgactgtaatcccaactacttggggggctgaggcagaagaatcgcttgaaactgggaggtggaggctgtggtgagctgagattgcgccactgcactccagcccaggtgacagtgtgagactctgtctcaaaaaaaaaaaaaaaaattcatctcccccactgagccacacggcccagggtctgtggcgtgcagcgtgcatgttcctagagctttgagtctctaggccagaagccacgcgggatgttgagccaaacacagaatcacatgctggctgtaccgcctgcctcgcctttggacctcagcctacttatttgtaaaatgggcacagtcatcaaccataataataatcaaacagctgacacttactgtgcattttccatgtgtcaggcacgatgctaggcactttatagtcattcctcagtacctgtgggcgactggttccaaaactccctgaggctatcaaaatctgtagatgctcaagtcccttatataaatggtgtagtatttgcatataaactacaaacatcctgccctatactttaaatcacctctagattacttacaatacctaacacagtgtaaatgctatggagatggttgttaaactgtattgcttagggaataaggacaagaaaagtctgtatgtgttcagtacggatgcttttttgtttccaaatattttctatctatggttggctgaatcaacaaatacatagcccatggataaggagggccaactgtgtaagcgtgtatttattagccccctgaatcatcacaacagccctggtctttccatctttcaagaaatagatgcttattaaaatgatttgcaaattgtaaagcgagaggtataatcattactgttattttctacaaagaaagtggcctcaaccctgaagtactgtatgagaccagaaacagttctaatgacagtcacccgtcatctaccaagtgctcacagtgtacgaggtgctgaccaatgggatcttcacgggagactctggagaatggcctccccacagccctgcatctaagtggctaggaggctccaagaggctgtgagaccccctttggatcacctgccagcaaggggcggagcggggacttgagccagctccttcagatgcctcagcccgggctcctactcatgcaaccagggctcctgtgggcatgggagcagaggtggtcaggagtcctggcacctaccagggaccaaggatcacacctaaaggagtgcaagaaaaatagcccagctggcagctctagtgggctcgggaacattctcacattccatcctaatgcctggcgagccagtgcctcaatgtccaccctgggacgatgctcacatgtgtgtccaggaggcacattcgaatccagtgatgtttagggcaatgcacttcctgttaacctgcagtcaggaacaccctggatgccctcaaaggcatgtgggctggatctctgcagaggagtgccacacgagagggacgccaacagaacaagacagacctgcagatctcccgggcagagggccagaccacaggacaggcaaaggagccctcacaggaagacacgcagactgtgctgctacctgtacacagaggagagcaccaaacccatgtatgccatgagattgtccccgtgtgggtgaacatgcggaagacgacagccacggtgacttccagagaggggagggcagacagaggcagagggtgtggggggggtcataaaccccagccttatcagaagtgttctcatgtttaactgatgagtatattacttgggtaattaaaacccaatttagtaaaactgcagataataacccactttacaaaagaaaacaaaagctgggagattaagtaacaagtccaaggtttcatggaaagcaacagagtcaggtagccccctccaggcctcggccccctcgtctctagaatagggaggccagacaagatgatgctcacagttccctggagcacagaccttctggggttccagcccgcatcccatcaatgggcagatctcttctctagggctatacccaggaaacaagaggaagaccggggctgtccattttctgggcctcaagttctatgtctctcacatatacctctcccctgcggacctgttatctctgcccacacagcctccctctcattcccaggcccccagggctttcctgggcctccagagcccactctgcctacaagctcggcaggctgaaagtgctaggaaattacccagcccatcccaacactatacaacatgcaggccagtgatacaaaaataatcctcatcaaagggcagagagatggaaagagggcatggcaggcagccttttgagagggctcctggaggcctggacccagggatgggagaggctgggggcatcctcctccccaggagaggaaaacagacccgcccctccttgcctgggtcatcagaacccaggcctcaacatgctgcttccaaagataaatggcatctctttccaaaggagccaaaatatagggcagagtcctcagccactcccctgaagacccctgagcccaccacagccacaggtcacctggtggtggctcctggctctgcccaccaggcctgtcccctggatgcagccaagccaattggaaccctctcctgggacccctccctcgggagctgacggggacgagctcttctctggtgccaaggctgcatctcatctcatcggcagcttctcagagacagctcactcaaggaggcagctcacacagagacagaggccagtactgggaccagcctcaggcccagccttctccagaaggaggctgcctgtgggcaggactctgggtctgttttgccctcaaacagcgcctggtaccacgcaggcactcgaaaaagtgtctgttcggtgaaccctggggcaggcccaccctaacccgcccttcctaccgatgggacggtcacagaagccactaaacggcctttgctgcttccagcaattcaggttgggtttccgttacttgcaactaaaagctctgactcccacagctcccagaagcaatccacagcctcctcaaagctaaatccaggattcccaggcaagcttgggagccagtggagcgagctcctgctgccctgctgtatcgcgggcccctgcaggagcttcacccgcagactccactcagagctgcggaggctgaggcgagagggaagacaggctcctggggctgcacacacagaccaggccttttgtatttggcctgcaaggaccaggccttcaagacgccaaagacattgagcagcaattaaaattcctcagatttctcctggactatttttatctgcccaagatgcaatcgacatgctcctaactgtagatccccggccttcagctccccacatcctggggaccccagcctgagcctgcttcctgggcttgagagtttgcacagggaaggtggacagccagcaaggagtgggacggcagggctggcaggaaggacttcagaccctgggcctgactctgaaaccaccatactcccttcctccagccctcaggcctgagacccgacagggtactcataatccctagagacgggttgcccaatcctgaacctcagccagcctcagtcaccaaagggccagcaaaggccacttcctgggctgtcacaccagcaagtcgcaggcatccacatgccatggtcgcgccttcctccagagccatgtctctgggctaccatgagtacttaaatgcttctctttaaattggctctctctctctttttaacctagtcttgccataaagcaataagatcaataaaatcacaggtgttgggggccttggtttggtttggtttggttcttagatgggggtctcactctgtcccccaggatggagtgcagtcgcatgatcacagctcactgcagcctccaactcctgggctcaagtgactctcctgagtatctgcgactcccaccgacacaggccaccgtacccagctaattttttaaaactttttgtagagacacagtctcgctatgttgtccaggttaggtgttttttgttgtttgtttgtttgtttgttttgttttgtttttttaaggacaattcatattgaacaaattcagaatcattaaaatataagacacccaccacttgcccctccaacccctcaataggacatcaaccattgaaccatgctttcggaaagacaggatttaaagaacctaccccctggcccccacagtggtcaggctggttccaataagtaggaagacggtgggtgggggagagacaccagacaaggtgggcaccaggagatgccaccaaccttcccacctggccaccctccttgaagactcatggcttcagtgtgatttctgagcatggagaaaaaatgactaatgggggaaaaaaaacccaaaacaccaacaccaacaacagaaaagagtaaatcttgacatcacccagaatgctccctgatctcaaactgctggcatttcagagcccttaagagatgaaccaatgtagggccaattgcccagagccaggcagggcacggggtggggagactttgctgtttgtctgaccacaattttccgactagacagtgttcaaaggcatttctacagtggaaactgggatctgatgggcatgttggggcctgggggtaactgaggtcatgaatataaaggactcagtgatgatgataaccagtcttagtcagtgtgcgacatctgccaagtgttccatgaagcacgttaggggcatcaccgaccaagtgctcccagcagccctagaagctgggctctgcgatgacccccactttggccatgaggaaactgaggcttagagaggttaagtgactcactcgagttgtcagtcaggtctgggtttgagccttggttcttctgcttttatactgtgtgactttgtacaaatgagtctacctgactatgcctcagtttccccagctgaaagtggaaatgacagcccccacctggcagggcagttgtgagaggaatggagagtatgtgtacagtgcttggtgagtggcctggctcaaatagcgtgtcccaagtcacagctgtcacctccttctccctccgggccctggtctttcattctcttccctcacatgctctcttctgccctggtttttgtcagggatgccacagcggatcaaagcccagcccagcactgcctcatcaccccagaaggcctcaggcgaccccacttctggccggctgcagagagcagagagagtgcactcagcgcttgtcggagtctctgccctcccacccactgctgaccacacacacacggccttcccacccaccactgacctctctaagccactgcccaccacaccactgaccccaccacaccactgatcctgccccaccactgcccaccacaccactgaccccaccacaccactgatcctgccccaccactgcccgccacaccactgaacattgcaccactgactctaccatgccactgcacatcgcaccactgatcctgccacaccactgcccaccacaccactggccccaccatgccaccacctgccacactgctgactagcccagccactggcccgccacgccacacagccgagtgctgataagaggagaggcccgagggcctgtggcgtgcctctgatcaccaagcagctggggcggcatctgccagcagttcctggccctgggacaggcccccggtctgctgccagggtctagcacgtgtgacctgccgacagggtggccctgagccaggctgcttatgacaggcagcactgtcatctggccccaaggaagggtgccccatagccataggccacctcactgtggggaaaggatgtgtgctcctgcccagggaaggggcttggggacccaagaagcctggaatttcttgctcagcctcaggaatgaagggcttgagcttcttgcttttctgaacctaaacgaaacagatgaagtaagagcctcttgattcctataccctgaggcctcattttacggacaggacaagagtgtccatgagcacaggtgtgcgcgcacacacacacacacacacacacacacacacacagagtccacccatgcggccctgcagtgccctggagaaaccatcttgcagaagccatgctcctacccactctgatcccatcagccctgggcctcccactctcatctcctggccccttctgtccccttgtccccaaaatagctctaagaaacttgtcaccatccctctcacaggccagaccgcccacttggagcctcccagccctggaccatcctgtccccttcacccggagcgccctcctccctctactgccagtgaagtcttttgcctcctccggagccactgtggatttcgacttcccaccatccccaaccaccagatgaggacataatcaagagggtcacactggcggcttccagaggactcggttcattctgaaactcagcagttcgcatgctgccagggctgtgatcgaaagcctcagtggccacatctataaaatgagggcaccaatcccacccgcctgccacgcagcagtgcacgatgatcacaccaaaggtgggtgtggaaaagccgagaaggtgagaggggccatttgggaatgagggcccagggtccacagtgctgtcagataggaagctgctgaggagcagcctagtccgctcctgtgctgttgataaacaaaaaggtgcgttttccagaatgtttctggaaggccacgctccacttcagaaatgggaactggggcgctgtctccttcagctgtctgattttctgggtgatttgaattttatatttatattctctctttttaaaccaagaacattcaacccttttatactgaaaaaaataataataactttttccaaagcggtttttccattaaaacaaatgatgtggctctccctcctgtttgatgtcaccaagttgctcaacaggcacctcaaacttcatgtgtccaaaccggacgcctggcggcccccaaacctgtcctccccagtgccttccctgtgtacacagggcagctccctgcttccttcactctggccagacaccccagaggcttccgcacatcctgttggctctccctcaaaacacaccctgaaaccaatcattgccacctcctccacttctgccacgcattccaggccacagtcctcttgaataatgacaaccattttctattctctgccctcgtcgccaccccaacccctacccaattccccaaagtcccaccaaagcccatcaaagccccacccaatttgtctgccctatcacctccctcaccccttctgttcctccccattcacccgctcgcccacagccacacaggcgtccttgctgtttctccaacaggttcagctcattccccattcagggtcttcacacacgctgttccctctacccggaagactcttcctctggataacccctccctcctgcccctccttcaggtttgggttcattatcaccttgtcacctaggtgaggtcttcccaaatctctttatttaaaactgcagccccctctcccacaatcccttatttatctctggggcattcccaccatctgacacattatgtatcaacgcctgacggcggaggcactcgaccagcgtgtgttgaaccaccaaatgcagctctgtatttactgactcagaaaaacacgccctgcattttcttgaaagaaaaaagtagttgccaaacagcagagaaaatgtgattacatttcctaacattatctgcacgtgtttccacgcgctgtagtaggaggcacacgtctgcagagacgggcaccaaaatgctcccagaaatggtgcccggtgctggattccaggtcacccaatggtcttccatgaacacacatgattacttctacaatcagaaattacagcaaagtgttttgaaggaaaaaaaaaatgctaaaacatacaaaaatgggcacccaagttggttctagaaagactcacactcagaagtctgctaaaagggtcttggccctagcagtggcaagacctacagcattctggtgaaatgggtggcctcctgattccagctgggagggaaggtggagactccagactttggtccacccagaccccattgctcccttccacagccacacagtgcacccaggccacaaagaggccacagccacacccatgcctgcttctcactgctctcactgtacatgcataggaagccaggggctgtgtaatgcagacagcgctttgattccagaaatggcatgagaccagctgagcatgcaagccaggctgtcatcgggggctcagggggagcagggtggcactctctcctgcccatcccaaccagcacacaccaaattttgctgttgccattctcaggcaaccaaagatctcaaagcaaaaagtatggggatctagaaggccactgcctgcccctgcaggtccagtcaacagcccacatcaggggcccgtgtcaccacagggtggtcacctgggaagccagtgaggtctgggagagtccgtatggtcagcatggaaggtttgaggccactcttgggcctggggataagaaggtcttcatggcagtgactccacccatcacacctgtacctcacccatcacacttgtacctcacccaacaaccccaggaggtccacgtgtgagctattgctgtttttacagatggggagacttagagtcataggggaggcaagagagtggtaaggctgggagaaacggagcactcccgagaggaaggccagggctctcaggacatgcccctgggtgttcctggatctggaagagaggcctctgctgtctgagccccacatttccaccaggaccaccagcatcaggccaggccagagcctttgttcagaggttctgacctgcaagaaggacccagcccctctgagaatgtccccctagaaaaatgccatgcaaagaaaattgcacattgaatttcagggggttcatgaacctccccactacaagtccttttgtgaattttagtttaggaacctctgagagtccagatggggaaactaagggctcaaaaagggacaggacttacccagggtcacaaagccaaagaggagcagagccaggatccgaatatagaggacccacagctggtagcaaagaaccagcgagcgatgagttccctcggggagcagaggcacaggacaagagcccccacacaccctgactgccaagggctggagcacccagaccaacaagcccacctttggacggtttctccacaagcactgtctcaggcaaccaaacatttcaaaggaaaacgtagtgggtccaggcatgggggcccaggacgtttggggaatgctgcgtggacttctcaagcctttccagaccacctgtagcaggcctcccacgaggtgctcacagatcaggggtctccttacttctttagaccctttgatagcagtccacctccccagggcaccgtgtgcacgtgcagatccccccgggtctgtgtgcccccctcccttccctatgtgctccccaccagcagctcacacctgggggccctcttcagaggcctgccctagggctatgtctgcagactcagagaactgccgtgtccccaccccaggtggccctgagcctggtgcaggagaatgaaagcccatacctcctgtcacgacaaactcagaagcataatttataccccagagctcccccagagggtcagactgaagccaagactttgcctgaaatggcacctgtgcttggcttcttcctcttgtctgtcctgcttcctccactgcctcactggcctgccctgccctgggacagtgtcctgagtgaatcactagcacgtgaccctcacctcaggctctgtttctgcagtccctgacctcacagggctctcccctgaactacgcgggtagttggaggaatcctgacccacttggtgaattcacagggagtaggcaggccaatgaattgcaagctggttggtctcagacaaagcaggtggaacatcagtccagcccagaaaggcaatggtcacactgtggccaatccagctacgtgagaggccagggaccctgatgccagggctcaggcctgagaggcagaaaaatggaaatggacattttcttcccaccccaccccaccccatgccagccccacttcaggaaaccccctccccatctttcagagcctaattcaagtgcaagaagcttgttctaagcaccttgtgccccaggaacctctctcattcagccagcgcgtttcaggctggcttcacagactgtaagtttgggaggaagccgaggctgtaggaagctctttgtccctcatctggctcctgcagtgggcatctgaaattcagaagcccctggtctccagcgcccccttcctccttcttctgggaacactttgattttccctggcggctttctagacctcacaaataaaaacataggacattcagttaagtttgaatatcagataacagatcactgtgtagcataagtatgtcccatgtagtatttgggatagacttaaaacacaaaaaaatgaagtgctatttatctgaaattcaaatttaactgtgtgtcctatattttatctggaaaccctgcccctccattcctctcacccacatggtgtgggcaggctgatttctccccgtaaccaccagggagggcacatgacccaggcctgcccagtaagagcttcgcaccacgccagccatggggactggtcagggccgggcacacaacccaagctatgccaaggagaggcaaccccaggacatcttctttctctctgttgactttggtgagatgtgagctgagagcctgaccctactgagagcactttaccacctcacagagaaattctagctatgaaaaaagctaatacccaggaaaacagagccacgaggggatgcaaaaggggtcctgacatcatttgagcccctggatcaaatggtgcctgaagctagtacctcccctacatttttcaatgacgtggaccacaaaatctccccttttggcttaagccagggtgagcttattctcctcataagccagtgagtgagtcctgctcactcgctcctcctcacccttgccacctgggcatgaggctgggcagagtctatgctcagagaacatgtttaatttcactaaggaggatggtgtggggcgatgggagagcctgagctctccagtcaagcaggcacagttcccggccccactcggttccatcctcgttccaagtccttgcacaacaaactctccatgagccttggtttccctatttgtgagataaacataggtacttatacctggactgcccatataatgctagtgccttaaccaggacactttagagagacaaagggagtgctgttcatacccaggttgggagagactggaactgccctgggtaaagggaccagggatgccgtccctacaactgaccctgcctgtctccacccgcttctgcactagccctcccccacagcccatgccttcaattccgccccctccccctccccatcaccaccctctgtgcaggatgctcccctactcgctgcttctcgctgcctcctaattcattcttccagtctcagagaagccatccctggagccccgggctctgtgcgggccccactctgcatcctccttgcagcctttggcgctctgtgagacaactacttgtggcttgcaggctccccagccggctaaactcgttgaggacagggtccgtacatttctccctcattactgaaggcccttacagagctggcatggtgcctggaaaacgacacataaaatagcagacaaaaaaggacaccgctaaccctctcttcctcctctctgcaggctctgtattttctctgtgcatcgataaaaccatcctggctgcgatgccaggcagggacaagtgaaactatgaatcatggagtggggagggcatggggcagggctaggacccacccccagtgggcccaggacatgctggcaatgttctcagagccagtgacttggggacagtggccttagaaggccccgcccagtccagcagcccccaggcggcggcagcagcaacgcgctggccttgggacagctttcattgatccaaggccaatgtggactggacctgagccggctgcctattccagcatccagccctggcccctgctcaaaacacaggcctggcgtctccctgtggccttagccagctctgtcctcagcggcagccaagtcactgcccagaatgcaaatggggcaggtgcaatgggcttctccaatctgagaccaaggccatcacatcccacacacagcccaggttgttccacacacaagcagacagggtccccttgggttgcttggcccccgcccacacagctttcctgcctatccccgggcagccaccccacctatttcttggttcagccaggcatatagcctgaggtcaattacctggagaacgcattgccacaccagctccctggctcgcaccccagcccaggtggcgcacgctcattttattttcacagggccccttcctggctccacagccttcactggctccgtgcttcaatcaactcaaaaccctctgaagtcttgctgtagcttctcagtccagctcactgggaaacaaatggttatggtagggaaaaatgctagcctgggagctgggtggtctgcctcagtttcctcatctgtacaaaaagaggaagcatggcaagagggtatctccaaagactttactgctacaatagagcatgactccacaggctcaggagagggccaattcagccaggccccaggctccgttcctcctctgctgtcttcaggccacccagaagggccactgcccacttgcaaagccaatgatccgtcctcagtaccgtctgtctcaggaggcaaaagtattttgaggagaaggaaagaaaagtgtggatgtgaatgcttccctcaactctgcatcaacccagcacccaaccctcccagcgccagacaccctgcccacaggggagccacagtggctacagatggagagagaagcgcagctcacaggctgaggaacaaacggcaaatatctacctgcatggaacaccaggaaggaccccatcagcctcagcctaacagtcagtacctcaaaaaagaattatcaggttaatttaaaaagaggcttcattctggccgggcacagtgactcacacctgtaataccagcactttgggaggctgaggcaggcagatgacttgaggtcaggagttcgagaccagcctggccaacaaggttaaactccgtctctactgaaaaaaaaaaatagctgggcatggtggcaggcacctgtaatcccagctaccagctactcaggaagctgaggcagaagaatcacttgaaccttggaggtggaggttgcagtgagccgagattgtgccactgcactccagcctgggcaacaaagtgagactccatctcaacaacaacaacaacaaaaaaaaggcttaatgctaatggccacaaactcataatggcagtaaaggagcaaacggcattgccaggtggtgtggggcccagaccatgcccccacatggcctgaggcttgggtcctggctctgtcacctacaggttgtgtgatgctgggcaaactaataaacttctttgtaccttagtttcctcctctgtatgatgggcaaataataatatctgccttgtggagttgctgggagcattaaattagctcacatttgtaaagcgcttggaaaacaatacctagttccttagaagcaccatataaatgcttgttaaataaataaaaatgaaggtgaatataaagtacataaagacacacttgtaatgtaaaagaaggatgaccatctcaagaaaaagaaggatgactgtttctaaacatctttagcattcgttggttttaacatataggagggtgtgaacacatgtggggatttttttcttcctccatcaggcataggccagacttacatgaggatctgatgtgttctaatattatttgaacaaacacaaaagtatcagtatggggagatgaggttaagcccaagagttctggaaaaggttgggcctcctccaaaaatgggaaagctggattggcaggagaggtcacctatagtatcaaggtcaaaagagtgttcagggccaggcacagtggctcattcctgtaatcccagcactttgggaggccaaggcaggaggatcacttgagcccaggggttcaagaccagcctgggaatcatagcaagacctgtctacaaaaaatttaaaaattagcctggcatggtggcatgcaactgtagtcccagctactcaggaggctgaggcaggaggattgcttgagctcaggaatgggaggctgccgtcagctgggatggtgccattgcactccagcctgaacaacagagcaagaccctgtctcaaaaagagaaaaggaaaaaaaagagaagagaaaagagaggagaggagaggagaggagaggagaggagaggagaggagaggagaggagaggagaggagaggagagaagagaagagaagagaagagaagagaagagaagagaagagaagagaagagaagagaagagaagagaaaagaaaagaaagcattcagcaaaggcctccaacatgatccatttgcccgctgcctttataggggagcgtgaactacccagacttgggccaccacctctggagggatgaaccctcggggcggctccactaattacaggttggaactagcaaggcacagccctgtcttaatggtgcccccgaccaggctgactagagtgggctgcaagtgccagctgcccagagcttccaccgtgcagcacctcagggcatgctgggctatagaaaagcaaaaccaaacaaaacccatgaggaaggcgtgggcttaaaaagctctttttcaccaccagtgaagtttaatgcttaaaaaggaagtcaagaaactcgactggtgcttgcgtctgagggactggcgcgaggaaactcatttccgtattctctctactttcgtgtctgtctgaaatgttctatgagaaatagtattaaaaaggggaacttagtctaaagaacaggggcttgagtttaaaccatcttgggagaagcagccaggcccaaggctcaccaagagtcaccgcgcaacgaggaagatctgagtgctggggtcggagaggacattaggtttcctttaggcacagtgaggtcacagcaaaataggaagaccaaatggtgtgccgcactgaccatgtgccagatgccctcccaagcgccccatgtttataactcatttaatcgtcacaacaaccatgaggcagacgttgctacttccccattctacaaacaaggaaactgaggcagacagtagttaagaaatatgaggccaggcatggtggctcacgcctgtaatcccagcactttgggaggctgaggcaggtggatcccttgacgtcaggagtttgagaccagcctggccaacatggtgaaaccccatctctaccaaaaatacaaaaattagccgggcatgatggcgggcgctggtaatcccagctaatcgggaagctgaggtggaagaactctcttgaacccaggaggtggaggttgcagtgaaccgagatcacaccactgctctccaacctgggcaacagagcaagactctgtcaaaaaaaaaaaaaaaaaaaaaaaagcagaagaaaagaaaagaaaagaaacttgaacaagtagctaacaagtggcagcactgggatttcaacccagcctacctgggcatgaggctgagctctagccaccctgctgagctgctgcttcatttcagccaagaacagatctcagcccagtggggtcagatgcagaaacaatggcaaaacaatggattaaagctatagcctcaacagcatagctttggcatgggcttatttgcaagggcagacaagctgataactaccgttacctgctgttagggtatgtgacctgtcattctaaacttgcagtctcagtcccagttatttaagttaacttgaaatcagcatttaaatctttaagaaatactggttcctctattagatatgtaagttgaatgaactgagcaataaacaaaatactgaagggtgtaagttttcctttccatgtatgaatgtggcctggacattaaggaatcccatcagtaccaggccaccagccattcccgtttcatttgctgtccacccaaatcagccacacctgccctgaggacatctgcactagggcagtgatccccaacctttttggcaccagggaccggttttatggaagacaatttttccatggatgggggcaaagggagaggggtcggcagacggtttcgggatgaaactgttccacctcagatcatgaggcatttgatagatttccataaggagcacacaacctggatcccttgtatgcacagttcacgatagggtttgcacttctgtgagaatctaataccactgctgattttgacaggaggcagagctcagacgctcacctcctgtagtgctgcccagttcctaataggccacagacctgtacccacccttggcccagggtttggggatccctgctctagggaactctttgggattccatttactgattcaactctggacttaggtccatgatacatcccagctgtagaagcagagggaagtccagaggtaaagcatctctccttagtgacccacaccttctttcagatccatcaagatatatgcaaactgcagagcaatttttccatgtcagacatagaagccagagaacaaaagttacgtggaaagcctagataatgcttttccccccaaagtaatacaatgttgggctatgttaatagaagtattacacctatattttgggaggtgacgattctactattttctactaggttaggtgccacctgcaaacaaaatctcatatataaagaaagacatagctacaccagccttgcgattcaaagtgtggactaagggctagcagtcttgacatagtctaggaagtggtcagaaatgcagagtctcaggccccatctaccctacaaaatcagaatctgcatttttgcatcatccccacacaattcatatacacattcaagtttgagagaccctggtatagggatgaccagaaagatgactgcatgattacagctaatattgatatacctagcacgtaccaagccctattttaatacatgtgagtactttatatccacacagctttcgagtcgtggagctgatggcataatggtgaaggggtaggacctcaaggaacagtgagaactcacgacgacctgagagatgggatggaagaagccagcttcctgccttcagacagggagagaatgactccctcaccagaggaagaaggacaattctccatatttcttgaaggcagagcaggactaatgacacataaggcccaaattctctatcattccaggagctagagttgtccaacaaaggacaatcaagggagtgagcttcctgtcacaggaggtatccaagcagatgctgggaggccttctgtacaggatgcacagaagaggattcccatttcacaaaggagtcagtcttgatgggttgaacttttctctctaattgcaaggccaggaaggcatcttctatatctactgggaaccagaaggtgggtgtgctcccattccccaccaaaagctgcctgtgggttgctatggcctatgacatactaggaaacctctgtggtctcaaaagtcggaacagaagatggggcctattattaacccttcagccccagcacctccctcaacctagactgcagacacgtggctcacggtggtcctcaggtaataagcagagctaaatgacccctggctggagatgggaggggaggtagggagacagccacccaccccccgcccaaacaaggagacgcctctgtgactcagtgatccacgctttctcaaacagggaaactctttgaagaagtcccccatccactcaccagtgggccaccaccttgactaaccagatcccacgtgctggtatctacaagtgactgcaagttttgctctgttcacagaagaacgaggtgaaaatgaaaaaactttgttgggaatttgccttctaaaatgtcaaaggccagggaaatggacctggcatggaggcagcagggctgagggtcagagtctgaccaccggggtcaaactttcagctccaccctgggtggagggtgaatctaagacctccctgagccttatattcttgtctggaacatgaagatgagaagaatccctgcctcgtgaaaccttagagcaatgcctagcatgctgtaagcaccacatccaaggaacaccaacagtggacaggaacagaacccttgtgaagagggtgctttactgagtatgtccgttaaacagggcacagactcgatgaaatgacaaacacacagtgatcagcacgtctgtgacacccaggggtcacttgttcaatgctagctgttatcacggtccttcccactgctatcagttattactattaccaaactcccaatggaaacaagaccacagtgtcacagagcacagtgtccagcccaggaggaggaggtacagagaggaggaatgcaagactctgagggctggggcgggaatgacttggggcgtggggaaggccctgcctgggtaaacgcttggcggctggatcttggaggcagcaaggcctctggagagccagctccacggcctcagaagtcaggccagctttcagttcccggcatccgggccccacgtcccccatcgggcctgctgcccagggcactcagattcttccaaggcccaggatgcacgtccaaagcagcctctcagactcaggccccgaattccttggccggcagggttcacgtctccatgcggctgacagagcccagctgccgggcgccttctcctctgctcccaccaaggccctaccagcccctgagcccaggaattgggaagtgccagcatccccagctcctgccccagccacgtaatcagtacaagcacccatgagggactttagctatcccccttggttcctctgcacctggacagtggcaggtactacatgttcaaaatcggaatctaatgacaggtttccccatccacctcctttgtgaccttctccagggactggaaggaaatcccatgaaagaacaagttttacagaaaaattaacaaaaaagaatcctctctgttctccaaagcagcataccccaaatctggcagcactcggactcctgaggacagcaagggaaaatgccatgcctgggctcggcagcaggtgccttcaatcgggggtccgtgcagccaggcccacatctcggacctcagtctgggcgcctgggcctcattacgatctacagacgacagcccagagccctcagatacacaggtgctatagggtaagtgtaggggtgtcaagaagctgctgtccacactcataaagggctcagcaggtgacatcctaaatgaaagagacccttgtttatccatggaggtcaagggaaagaaaccaaacagccccagtagctctcaattctccatgtgcctatggccttgggttgcttataagctggctggtattttaataattgctaacatttaccaacggctactctgtgccagacactgtgccacatgctttacatttatccccttttcaaacccttgcaacatcccttctattatcatacccattttacagatgagaaaactgaggcacaggttaaataatgccccaaagttacacatttggaaagcagcaaaggtaggaccttgcccaattctaggacctatgggctgggaaaagacccttcaaccaaactggggcaggctgattacattcatgtactaatttgttcatgcctaactgattccatacccttttgggggagccctcccacactgagactgggcttagccacgtgacttgctctagcagacgggacggtagtgaatgtgatacagaaacttgataaggcactggggagtccacttcctctctcagaccctgtccctgcaataagaaacgcctggcctgctggagggataggacatacacaacaaggagaggccactggtcccagccaattctgatctagaccaggaagctgtggccaactgtcttgaagcatgagcaagcccagcccagatcaacccagcccaggtccatacagctcccacctactcgcagatgtgggaggaataactaagtcttagggtggtttgcaacatggcaacagctaactgatatgccaactgcactgcctgttctcttttgacacaagaaaataactgcctgagaattaagagaatgagtgagaaagacatttaaatcaaagggtttgctttaaatgagggattgtcaaaaagttactgtgtttagatcaggattcaaattttagaattcttgacaatacccatgaagggatcaagccacatcaggagtcacaactctactcgctccatcacacctgtgtcatgtcctttaaatggaaccctttattgatctgttctcctcttttatatacttaaaaggcaatgctctaccatgtgccaggggacacggcatctttcttccatgccagcctgacatgaagctacacctctgtgtcagctatccatcattgtgtaaaaaaaaccgctcctgaacttagtgacttaaaaccatcattttactatctttcctgatgctttgggcagactggcctcagctgggcagttgtgctggtagctcctgagtcttgtgtggttgcagggggaggaaggctggggctgctgtcatcaggagtttgtctggtctggaataccccaaatggctcatgtctgacgccttggtaggggtggctggaaggctgggctcagctgggacactaattgggacattgggagaactgggcctctctcttgtcctgttcggtctcagagcctcactctccacgtgacctctccaagtagtttctccagcaaggtagctggacctctcatagggcagcttggggctctcaaaagcacaaaagcaaaagctgccaggctttcttacacatccctcccactgcctctgttggttaaagcagttacaggggccacctagattccaagtggggagtaaactctacctctcagtgggagggcaacaagttgcagccactttaagccaccaaacctctcacctcctacacgcggccccctctgcctaacacccaagtcggtagcagcacacatcctgaaatggagcaataatgcatttttttttcccgggatggagtctcgcgctgtcgccaggctggagtgcaggggcgcaatctcggctcactgcaacctctgcctccagggttcaagcaattctcctgcctcagcctcccaagtagctgggattataggtgcccaccaccacatctggctaagttttgtatttttagtagagtcagggtttcaccatgttggccaggctagtctcgaactcctgacctcgtgatccacccacctcggcctcccaaagtgctaggattacaggcgtgcgccactgcgcctggccacaataatgcatttttaccccaatgcacactgggcagcaggcctgggatgggtctgcagcatatgcattgagtaaacaaatggtgtattcccagcagaaccacagataattcgtggatgaacatcaagacaaaggtagcagccttggaaccccagaatccctgctgtgtcacgagagtgccccaaggtgccattccagaatgaatgaatgtgtgggatgaccactgaatggcaatgttcctctccctgcacatacacagggatgtctggaaggtatgaggcaaccacattctttgcaaatacctcagtctaaaaatgggcacctgcaagatccagactcccctgggagggtccactttaggatatgtgggagggggcagctctctctcagggcattttgaatctcattttggctggggctctaggcacagacctgagggactgctgtagggaggacagccctgcgagagtccttaatcatctaactaaaaccacgttcaaggcataattagcaaacagctccagattcatgatctgaggcccactgactctaatggactaattaggtgagacatccttgggcgggcaatgcactctggccttctcagaaacatcccagagagctcagcagatcaaggctggcatctggtccatgagctgccttacgatggctgggcaaagagacaaacgcattactgggcaagaactacacacagcttccagagatcaacaaggcaatcccttccaccccagcagccccaaacaaccaatccttgcaacactcagatcctggacacaaaatcctttgctctgagcaatcagcaacatgctctctgcctcctgaaccaccctgccctttccaaatcaaggctaacagcaataaagggcacgcatgcctacacacacaattctgccctccccaggtcccactcctctgtaagctaacagccactgagagctgctacaagacagcacctcatcatcctggatcagaaaaataaatcaccagctctgtggaagccccaaaagtactcagggcctcaaatccaccacagatagcagacacttgctgtttagccagttctctccatccgaggtgcctctgagtaagtggcaggggtcccacaaagcaataggagctggcagaaggcaaagccttagcaaagggaaagtctgcatctttgggaagccctcgatgcctctgacataatagcaggtacaggcaggaatgcaatagacatgctgagtgaatgcaagagaaagcacccgagagaatgagagcactcaaaaccctgcagcactgtttgccaaaggactccctggccagagaagcttgggaaactggtccctaaactgaaggaatcctgagtaatacgaaaactccatattccagattcacaatgcacattaagacagtgaaggctctgagaattcctgcagttaaggaacttatttaatgggtagttgcagcaattgtttcacaacactaattttgcaaagaatctttttttccccagaatctccagtgggataatatatttaggaaatattgtccctggtaagcaatacatcagtacagggcagataccgcaagccccaatcccataggagctaaggagctaagttatttaaataagttaaatgggggcaggtttaatatttgcataaaaggcatatggaaacactcttcatctccatgaagaaatatgctctaatttttcagaaaacaaccattttggttcatcttttctcttccatctttgatagcaattgtttcctatgagagaaatagaaacatttatttaaaagcaatatagttctatagaaaaccaatgtgcaaaggcaatgatgaaaaaaacagagagaaaaatgagaaacagggttggtgggcactgcaggggctctgggggacacaggccctgtccaagagcacagccacattcagctccacttgaatattgccaggctaagaggttgatgccaatgatattagcttttccaatttttaaaaagaagtcagaaatctggagttctgagtgaaattcctcatttttaaatgttggctcaaattgtttaaaaaattgaaagggtcaaacaaaacattcctgggagctagagtcagctcaccaggttgcaatttctgccaaaaatgacagagtaacgctcattcgactggtgctgccacccgtttcccaagcttctctggccagggaaccctttgacaagggtttgagtacccttattctcttgagtgctttctcttgcattcactgagcgtgtgtactgcattccctgcgtgtacctgctattatgccagttgcattgagggcctcccaaagacgcagactttgcctttgctaaggcaccgctctaagcactgggccctcgcctctccttgggcaggccctggcatgtgtgggaaggggtgagcacacagtgtgaggccagaatggccagtccatcaaggggatccatcatggtgtcatgacaacactccctaaggtccttttcagaaatagaattcattctcaaatcaaaactaaaaacagaaagcccacctggagaggccagcaaaggaagacatagtccacgggactgagagagtgcatgtgtagcgggttggggtgcatgcttagtgggttagagtgcatgtgtagcgactagccggtgggaccaagacagtgcgtgtgtagctggtagcctgtgggactgagagagtgcatgtgtgtagcaggttagggtgcgtgtgcagcaggtacccatgggaccaagagagtgcatgtgtagcaggtagtccgtgggaccaaaacagtgcatgtgtggcgagttagagtgcgtgtgtagcaggtagcccaggagactaagagagtgcatgcatggcaggttagagtgcatgtgtagcaggcagcccacaggagtaagacagtgcatgtgtggcgggttagagtgcgtgtgtagcgggtagcccgcaggagtaagacagtgcatgcgtggcgggttagagtgcgtgtgtagcgggtagcccgcaggagtaagacagtgcatgcgtggcgggttagagtgcgtgtgtagcgggtaccccgcaggagtaagacagtgcatgcgtggcgggttagagtgcgtgtgtagcgggtagcccgcaggactaagacagtgcatgcgtggcgggttagagtgcgtgtgtagtgggtaccccgcaggagtaagacagtgcatgcgtggcgggttagagtgcgtgtgtagcgggtagcccgcaggactaagacagtgcatgcgtggcgggttagagtgcgtgtgtagcgggtagcccgcaggactaagacagtgcatgtgtggctggttagagtgcgtgtgtagcgggtagcccgcaggagtaagacagtgcatgcgtggtgggttagagtgcgtgtgtagcgggtagcccgcaggagtaagacagggcatgcgtggcgggttagagtgcgtgtgtagcgggtagcccgcaggagtaagacagtgcatgcgtggcgggttagagtgcgtgtgtagcgggtagcctgcaggagtaagacagtgcatgtgtggctggttagagtgcgtgtgttgcgggtagcccgcaggagtaagacagtgcatgtgtggcgggttagagtggtagcgggtagcccgtgggactgagagaatgcatgtgtagcaggttagagtgcgtgtatagtgggcagcctgtgggactgagagagtgcatgtgtagcaggaacacatgcacaatgacagccttattagaccctcataacagcccatgtgatatgtggctgaggctttatttaaatatttctttctttgtttttaaagatgaggctcatggatgtcaagtgacttctccaggtgatcatagtgacatttgcattcccagagacaaaagcagcccctgatgagataaggcagtgaccgagacatagccagtggtcttgcatccaggccagccagctactaagctgcccaggagaactacaggctgcagaaggcctcctgatcacctgcagaatcataggagatggaatgctgctctcacagatttctcagaagctgactgacagacactgcaatatgagaaatgtacacagtgtgggtatctgatcagaacctgggtgtgagtctctcagcagagcactagtagatccccaggggaacatcactccgcacagtaaaagaggcagaatcttctggaacatggagctggacatggccagctgaagaagcagaagccagcagaaaaggaggctcaggtaccaagggcacctgcaaagggaacaacgactcaagctggtactatggcagagatggctacctgcccccaaatattcctacttcctcttccacagtgtagagttgtcagcagaaggtagctgcccagatgggactacatttcccagcacctctttcatcagggtggggccatgtgattagttctcactaatcgaacatgagcagaagtggtacagaatgattcacagtcagggatcttaagcagtgggaagagtttttctactctcttattcccctttcaccaagtagaagcagagaactcagaggctctcacagatgaacaagccacaacatggaaggagcctggaccactaagtcactcattttccaaccaaggtacctgtattggactggtccatgagtgataaataaaattctaaacttcaatgtcaaggtgtctttactacaacaaccagagttgccccagctaaaacacaagtggaaagaaagaagaatacatgggtcaagaaaataagtcctcactggggtaagaagctcaaggcaaaagcaatacaggaaaaaatctatctgctaaatcagatcagtcaccacctcctacatacaatgcctcccacctgaatgcctctacataaaggtcaactttaagacccctgggtgcttagctatgcctaccttgattaagaatggcttacaaagacaaatactgcgtgatctcatttatatgtggaatctaaaatgggcaaactcaaagaagcagagtggaacggtggttgccagaggctagggaaaggaggaaatggaaaggggtgatggccaaggggtacaaagtttcagttatgcaagataaataggttctggagatctactgcacagcatcgtgcctatagctaacagtactccattatatatttaaaattttctaagagggcagatcttaagtattctttctctatctctttcacacaaataataataataaagagggcaggaggaaacttgggcagattatagacatgtctatggccttgatggtagtgatggtttcataagtgtatgcttattcccaaacccatcaagttgtatatattaattaagcatagctttgtacaagtcaatcatatctcaataaagtgattttttaaaataaagaatgacttatgaaaactcatttagggaaaaaagaaggttatttaccaaatatactctacccacccacccaacaaccctccgctgggaaggtattcctactatctccatcaacaagtgagggccacaaggtcaggaggtgtagtgacttggccaaggtcatgaaactggtagaggcagagcttggttttaacttaagaccctattccttccaccaacccaacctgctctgaatggtgtaaaatatttgtatcatttcccacaaatcactttctgccttgtatagggccagccaggtatggtggcctccgcaacacaatgggcacctcctgaaggcagggactcaggccatccatcagtgcagtctcacagggcccagcaggggcctctcatcactgactgcagggagtcacatgctgcttgacttcatgccctcacctgttgacggggatggtaggaataccttcccagtgggtcactgggtgggtggacagagtatacttggtaaataactttcttcttttcccaaaatgagtttttataagtcattctttaaaaaaaaaaaaaaagcactttattgagatatgattgacttgtaaaaagctatacttatttaatacatacaactcaatgaatttggggataagggtacacccatgaaatcatcaccaccgtaaaagccacaggcatacccacaatctccccaagtttcctgcagcagctctcaggccaaattctggtgcattttcaggatactcaggaggcttccaccccaaatcctgtcctctaacccagctctctccaccaaggataatcagaaacataacaaaaggcactgcttccacttctgaacaatcaccatttgatcatagcaatctggctatggatggataatcttatgagtcattcattatcaatatttaaaccaggaattaccatcactaggggttacatcttctttgctatctggaggaggagaggagagggagtgactgaatgtcttcatgtaattggacatgggggtgagtatagctgctcctcccagctctgctctgaggcttgcgaaggcaatacccacatctgcccaccatcaagcctccatctgaccagggcctgttcagggcctgggtgggaccctcaggagagtaagggcaaactagcatatagtcccaacaaaaggcaggaataagccaagaagctagcaatcaattctgggaactcagaatcttctagaatattcttgagcccaggtaggaggcttggtgggctctgcagcccagatgctcccctacggcagggtttctccaccttggcactgtttacatttggggccaaggtcactctttgttgcaggggcacatcctgtgcactgcaggatggttggcagtatccctgacctccacctgctagaggccagcagcacccccaacccagccatgacaatgagggatgtacccagatatcgccaaatgtcctgtgctaccatggagaacccctgctccaaaggatgcaacaaatggtggccacaccagaatttaggcctggtgttttcccattttccattttcttctatctggatttttatgtgatatgtctccatttttaaagtttggcaattaattaaatatttttatgctgctaaagccaaaaagcatgtgtaaaggtcactggccagagcctccaccaagccctctgctaagtccagatggaaaatgaaaaagcacataacctacttctcagtgttcgagctcctgagttcaagagcaagtccgtccccacagcccggggaaggagccctggaaagggaggcccacgttatttctggggggaatattgccacaagatcacctgtcaaaggggctcttcaaatcccttctcccaggaacacagacaaccccatttgttctttctccccgaaaatacaattaccctcgcgctgatgttctgaaaaccaggccctaagccggctctggcctatgaagcaaacacttgtgaaccacccgcctataaaaccagccagcctctgggcactggtgaatcttttagtgccaacgttaccccagaagactggcctccctatctctcagcccctagttaaagaacttgatctgagcaagtttcctttccttccagcgaaaatctgggttactagggggagggcagtagagaatctaataaatcttagaatatacttcttggctaaaggaaaaaaaaaaaaaacacctacttactggtgtcatgaaacaactttccagctctctcagaagacagctgggttcagaagttactattgtattcaagctgtattaaatcaagctgtgagaagcaccagggttatgcttttaaagaatgccctaagccaattctgatgtttaaagggaaaaggaaaaagtttccaaggcttccataaattccaaggagaggaagtttcaaacttgggtgttcacagaccatggcccccacatagaaacagcttggtttcatgtatttggttttactgttcaaactttagggtcttttaactttttatttttacagggctcagaagaaaagggagagggagccatttgctcaccaagtgccaaagaaaacccaagcgcctccctcagagggcctctgcctgggacgacaacgaggcaaggaggtggggaggggaccccctggctcctggcacgccccaggcacagctcctcctgcccgctggaggccaggcctgcgaggccagctgctaatgaactccaacaagatcaatccaaggcgagaccacgctgcactgccattcggccgtgcctgggcctcggccaccagcagcaggaggagcaaaatggagagtttccaaaaacaagatgaggcccagccaagtcccaaggaatcctaaatttagtccctgggggaagacggctatgtcgactcagccaggacaccagtgaggcccagcatcctttgaaatgtcaaccaaactaaacaggccctcccaggacacctcagcccccagttctgactcacacccacatttccaatccctagcccccactgtccaaggcctgtgtacctaggaggttgggcaagacaagggaggtatacccatttgacaggagagaaaattgagtcccagaagaggtagtggtgaggtagaatgaacataggcagtcctgcatttggatccagcatcaagttctatcacccaatacccatgtgactaggaagaagacattctgccacttggagcctcagttttaccatctgtaaaacgggagtgagactatttcaaaaagtactgaaaagacataaaattttaaaatttctatgtatatatagacacacatgcattatatatacatacatatatgtcatatacatgtgtgttaaaaagagactgctgggctgcaccccagacatatatagtcaacagctgttgtttgtgccagctcagcaccctcacccccgcccctgctcccctctcagcccctgtggctgaggccagcccaacccgtttccgtgagagttctcagacacctaactgaatcagaatcaccaggagctgaacccaggttattcaattttccccaagctattctaatacacagagacacttttaggagcagctgccagataaattcagaagatccaagtggctaagctcagagagggtgcgaccctcctcctagccctcaggaagcggtacatctgcaaagggtctcagattctaaagggctgtcagggtgggaccctctcccagctctgagccaagatgcagaacccagaaggggaggtcctgaggggcagagaccagcagaactctgatctgaccccagaaagcacttgctggctctttccccgcagcacccggcttcacactgcagggcaggtcaaggggatgaagaagagcccagaagctccaaagggcctcgctttaacctgatggggggagaaggaacagggaatgtccacctgcccacagggcaacttcagcatcaggaggtctccatagcaaccctccagctggagtcattcagccacctggagaccagacagggtgcaggggggcaccacagggattgagattgtgtggtgctgaaggtagaggtacgggttccagcaaagaaagaaataacaaagaccttcccatggcggggaaaagacttccagaaaggactttcttcttggagggaatgataattagtcataagagcagccttactgagcacctccaggccacacagttttactgattcacacaccaactccaggaggaagattcaactactagtttcgctttacagatggggagactgaggcctcagaaacattaggaaagttgcctacatttgcacaactgctaggcagcaggcccagaactcaaactcatctgattccagagcccactctcccaccctcttctgcacggggcaggtcagcaccccttccgacctcatgatcctgttggctccagagactgactttggtcagcactctttctaacctccacatctcctgggcttgaaagaaactggctttggatctgtctctgtcggactcagggacaagctcaagcccggacaccgtgctgcacccaagctgggtaagaagacgaaccataggggtggtcagcactcatttttagagatgggcaaactggtgcagagaggatttctctgattcccagagtcccacagcagatcccctgaaccccttctcaccaatctgccgcctcccctgagttagagcacaaaagacagggcggagcagacaactccactacccccagccatcgagccaggcccacgtaacacacggggttcattccccaaaaaaatccaagatggaagcaactacccccaccctctagtttacagacaggatagctgaagctcagagattgaaagaacttgtccaaagcacacagcaaagcactttcattctccaaggattaacagatgcctatatgtgtcaggccctgtgcaaggctgtggagccccaggagttaatgacaatatcctgccccctgccaccagaggggtgacaataccctgccccctgccaccacaggtgaataacaatatccacaactccttgctgttcctgtgggaggtgagcagtaactcaactgccacatgaataagtcacaaatgaccaatggtggtgagcattccaaggaggcagaaggaacaggatgttaggagaaggaaccacagtgaaagctgctccaaggcacatgtgagagctccatcctggagggtgagctggggagaacaagggagagtactgggaagcatctccagctgcaggaatagagcgtgcaaaggccccgagttgggcatgtgatgggtgtgttccagaagggagcagggcggctgggacggagtgaggtgaagggcggccggggatgagaagcaggaaaggggcaggttgtgctcagccttatggaccatgggaaggaatttagatgttcctctaaggactgtgggaagccgcagtagagattcaagtaggagagggagtggatctcattgggttctgcaaagtcagcctggctgaggcagggagaagaaattcagaggctgttggagtcctccaggagcaacaggatgatggcttagaagaggatggggaccatggtgagcagtgggcaaatctgagattcacagagtcatagattgacgaaaggtgtccatctggcagctctgcagggaaggaaggggaggagttaggaatgaccccccaggatgcctctctgagcaacagatgaatggagagcccgtcactgggactgggaggctgggagcgcagatgggtctcaagagttggtggggaaggctgcttccgacaggctgtttgggtgtgtgagcggcagtgagtggagggcacccaggtcttcggagcacttgaaactcccaaggtccctaccaacccccaaagcctccatgtgcacaaaccctggttccaccaggctgtgcggccagctgctcgtcctcatcctggctgcattgctgaccttcccctctccggatcacatctccccacaggaggcagagccctggcctctgtgtctctcaaacagtgatctccaaagacagaatttgggtttgttataggagggctgccacctgcagccccctaggccagagcccatgtcactgacaatttccaaggccttgaaagggacctttaatccaactgtctgtgttgagcaggccatgggcagcccctccttcccctccactttcctctcagctctcccttcaaaggcagccccagggaggagatgtccagcacagcctggccctgacagcgggacaggtgcacacccaggagggtccgccatgagcccagtgaaggataccaccagccagccctcagtgcagaagcctccctgtgcctggcacagggctgctatggctggggtgggggctacatcactccaatacctgccagccacattccaccctcagcacaaggtgctgtacagatgttaccgcactcctggcaacacatttcccagatggaaaaaccaaggctaatagacatggtcactccatagatcctgggagtggaagtcctaccccgttctgcctccaaaggctggccaagcttgtcacatagcacgtgaataataactgtcctacgtatcacctgctttctgtggctagctacggagctaagtgtttcacaggcattctcatctgatctacatgacagcttcacgagctaagcaccattttcactgccattttacagatgaagaaacagagacacagagaggttaaggcactcgcccaaaggtcacacagctagtaagtggcagggccagcatctgaatcggtcctggctatctctggggccagtacagtgtatctcagttcccattatcttccctcttcatacagagcctgtgtagaccataacattttaatatcacaggtattctgtggatctgtttatatactggatgtatatctgtgttttatacttaaaaagactaagactcctttgccccccaagaaccaatttctgcctccttggggtcaacatcatccccatggagtcaaggccagtgctgtgtgacaggaacagaatacaagccacacatgtaattttaaatgttctagtagccacattaaaaaacaaagaaacaggtgacattaattttaacaatgttatttaagccaatatatccaaaataccgacatttcaaaatactatcgttacatgtgatttttttaaattattaataaaaaaaagttgacatacttttccttttctacgttaagattttgaaatcccctgagcactcccaatccagacccgccctatttcaaacgttcagtggctgcatcacgacagaggctgccatggtaggcagtgcccgcccggctccaaccactctgctaaagcaatgttctgcatcttccccaaaactcctgaaaatccacctatgcgggacttcctccatccaaggaaccccatcactcctaaccagagggttccacttaataagttcttggacctcctacagacaagacaccatgctaaaaagctcacaagatacaacaaggagtaagaactggcctctaccctcaagcagcctacaatctaagtgggaggagaggagtgaaataattaccaaccctactgcacaccaggctctggggcttctcacccattctcttaatcttcatactcatcctgggatatgggttctattattaccatcccattttattggtaaggaaattgaggcttgacagaccatggattttgcccagggtctacttatttgacttggccaacccagggcagaacaaagatgttagcaaagccatgtggaagcttttaagaacaaggagggcagcttcagagagggcttcagggagggcgtgagtgaacttggaggcagcatgaaagggaagaaggaagcagagagccaaggataaagcaggggtgtatgtatttgcagggaacacagaagcaataagtgcatttctcatgggcgaaactgcacaagcagaaccttggaagcaggaaaaggggccagaattctgggcgctaaaacgctgtagcatgaagctggtgcacagcgcatggtatgaggatagtccaagttcaatcacccagacatgggaaagcatccactgcccaacccatagactataatgtcagcggaatctgacttcccaaaatatttatcagaaggcgctgggcaccagattccattctgtaaacctggatgctgttccaaagctgagatgatagatctcccagagaaccagataaactctccctcacattctaaataatgaagggaaggtggggaagagaaggagacaaatcaaccttctccaactgcccaacttaaagggattatggtcagaagcaagacgggagcaagggagccatctccttatcaggcacacggctgctccagacacagacaaaacttctagcatgcatccttcttccacattgggggagagaagcacccagtcctaacacacaaaggtcagtcccatcctctgggggggcagaatttcaagccaatctgtttccccctaatttccaagaaagaacagtcccttccatgtacagaggtgctgactggagctcaaagaatgaggcccataaatctccaacctgctaaggaggcccagatttcaaacctcccagtgcgccggcccactgcactcaaaggcacaagcaaaggaagctgtgggatgagtagattcaggaatgtggatgaaggaagacccccctctctcgctgccaacgatcaccatagacattatggactgaataaatgaggaagcgcttgacacagatgctctcacttaattctcctgaaagcccatgaggcaggtcctgctgttatccccagtttacaacaagaaatgacagaatcacatggctgggaaatggcagcaccagctctaacctggacttcctgtgtctccagctggggccccccataggctggcctaccactctcagtttcttcccctctctgatatgcggtcctggtttcaagcccagtgctaaccacgtctcttccctgttcaacacccttaggcttccgtgtgcttgcaaaataagccccaaatccccagagatggttaagaaaaggtaggcgggtgctcaggggccccccaggccttcgcaagccaattcatgtcacccactcccaactccaaaaaaatgcagcccaccccctcaaagggcccatccaagaagcgggctttctggcatcatattttcctcccacagaacgtgagaataaagggctctttgcttgtctcctgaaataactggctctcgccataaagcaatcttctgcccagtaaaaatatttctgtaaaacttggtaactctatctgcggttccttttctgaaagtcaaaaatcttggggagtgaaatatggcagaggccagttttatgacaagctcatgaagtcatgtctacccgagacaggccctccttaacactgtgattaatttgctgttaaccacagggactttgtgtcttaatatactcaaagcaaagcaccagttcacatttctaccagaacaatacccaccaccccagacctggtgtccagccaggcaggtagcggagccatggctgggatctggggccagaaaggactcagttgagatcggggactctgccaaagggccataacacacaagggagctgtcacctgtggcctgtccttggccaaggaggaggtacagcttataaaataagtgaggggtgtcccgagatcagagtgtaaaaggcactcacagctaaaccaaactaactccaagacacctagagaagcccctgaaacctccctagggctgggttttcccatctataaatggggagcaatcatctcaggggaactcctgagcaatcaaatgtgatgtcccctctcaacatcttcttctgacaaacggcaatcacgccccttccaggtgctattttcggccccaaagaaatggagaccggtttactgggaatctttcagaacacagcagcagatccagaggccttaaagggctactgagtacatctgctgggtgctcactgcatgctaacacttcagtggccatatgcattacttcatcatttaatctttgaaacaactccaaacggtgggcattctgttcctctttttataggtaagaaaactaaggcccagcgtcaacacggttcagtataaacccaagtctgaagcctggtcctaagctctatgcacccctcaaattgggagatcacatagggaaaaaggagtgaagtaatgcaattaagtcttaaaaaaaaagggggggggccataaaaactaaaacaggagttcctaacctggggccataggtgccctgaaattggaatgacggatgtaagagcatttatctaaggagagagacacaagagatttggtggattcccaaaagtgtcttgttactcactccttgagggttaaaaatcatcaacctatgatcatcatagagaggtcagaagcttgaaaggaaggctgtaacccaggtgggctgcatggaggaggtggcaaaccacctaggttcttccaagatccaatggcaatgggtgggtcaatggtcagctacctagctgccctgtccttacccagccttgccagctgctgaccagagccttgttcagtgattctgattccagggaccaggccatccacagctgttggctccacccatacagtgtgctttctacagccttctcctctcaagtcagtttctcattagggaggttcaagggatgcggggacgggggtgatcccagcctccactccaggacaggcatgtgacccaggactgtcagaggcacagggatgggttccgggatgtgacccaagtcaaaacaatgggagctccgcctgggtttttgctggaactttcttctctaacaactgaagctgggagtctggactgctgggagccaagttgccattacctgggaagggtgtgcctaaggatgaagccaatctaaaagaaagcagagatgaagacacagattgctgtcctgggacatagtttgggctggtggatccagctgtaactgaagtccactccctggttacacaagccaagaacttgactgtatgaaacagttgacaagggcttgaaatccaaaaggtcccaacggatccacagagaaagttcacacctacttaaccacaagctccccctgaagctgctttcctcctcgattttgtagacaccagccagaaggaaaaactccagctttgccagaaaaatagcagagccacacctggtgatcatatcaggatgtgcagtgtgtgtcgggggcacagggcaaggggtggaagcagaaatgcacactgttgctctaaagtcgaccacaggcagaagcccacaaatgatctaaatgcccagtagtaaggaatcaatgcaatgatggtctatccttataacagaaggcttgatagccatgaagaacaataagattatacattctgatatgaaatgatttccaagataagtttaaaaagttatgtattaagaaagcaaggtgcggagacagatgtatacatgaatcttaagttaaaagaaaatcttaagttaaggtctgtatcacttttcattgtagttgctgagagacatggtctcgctctgtcgctcaggctgaagtgcagtggtgcaaacatggctcactgcagcctcgaactcctggccccaaaccatcctcccgcctcagcctcctaagtagctgggactacaggcacacatcacaaacctggctagttttttgttgttactgttgttattttaagagatggggtcctgctacattgcccaggctggtctcaaactcctgggctcaagcaatcctcccactctggcctcccaaagtgctgtgattacaagcatgagccactgcacctggcttctatatcaccttttttttttttttgagacggagtctcactctgttgcccagactggagtgcagtggtgcaatctcagctcactgcaagctctgcctcccgtgttcacaccattctcctgcctcggcctcctgagtagctgggactacaggcccacacctgggtaattttttgtatttttagtgaaggaaacacggggtttcaccatgttagccaggatagtctcgatctcctgaccttgtgatccgcccaccttggcctcccaaagtgctgggattacaggcatgagccaccacacccagcctctatatcacttttttatggttctccaccttaaatgaatttttcaattaacctgcaaataccaatgcttcctggtcttgttggccaagacagcttctgctgtctgtgcagggataagcatgcacaaacagagcatggctagaagtatcttgaggagcccactacagcagatacctccaaagggggaagctgggaggtggaggtgggcggaggcttcctgtgtactgcataccttcagtactattttggattttcttttcttttttttttaaccatgcgtacgacttaatttacagaaaggaaaaaggtgaggaccctttctgaagggcagaggctctcttcaaagacacagaacagcctggctccataaaagaggtggggacttggacagaacagaacagaatccctgcctctctggctgtgtgccctctggccaagctgcatggcccctctgaacctcatccacctggaaaatgttcttgaggatctgccatgtgccaatcagtgcaaaaggcccagggatacaagagtgagccacaaagaacctgacctgtggactttacagtctggcctcagtttccccataataataattttgatcctggccacatttttgtgaatattaaatgcctgacaaagccctgtgaggaaggctttgcaagccataaagccctgggtaaatcctggctggaaaacagccacccactcaatgctgctgcctccaactcagcagggagtttaccttccagtgccccagacccagagccaagaggacgagacgccagtagcagctgctgagcagaacctccaaggttaagaaggctagaaaggccccgatttgtgacatcacaagaaggtgctctgatccaaccatctagaaggaagaccatgatcattccccaccatggccatggctgcggccagccagggctaaccaagcctgaacacagctatgttacaaggaagggggctctggacaggccccaaagacggttaaccagtacttcctgtgggggagagctttctttccatgaccacctgctgtgaatcactcctttgcactcctttgacgcctccctgcccactgaggatggagtttagcctgacacacagggtcttctccatgcatccagggctgtgcccactgaggatggagtttagcctgacacacagggtcttctccatgcatccagggctgtgcccactgaggatggagtttagcctgacacacagggtcttctccatgaatccagggctgtgcccactgaggatggagtttagcctgacacacagggtcttctccatgcatccagggctgtgcccactgaggatggagcttagcctgacacacagggtcttctccatgcatccagggctgtgcccactgaggatggagtttagcctgacacacagggtcttctccatgcatccagggcttgcccactgaggatggagtttagcctgacacacagggtcttctccatgcatccagggctgtgcccactgaggatggagtttagcctgacacacagggtcttctccatgggtccagggctgtgcccattgaggatggagtttagcctgacacacaaggtcttctccatgggtccagggctgcgcccactgaggatggagtttagcctgacacacagggtcttctccatgggtccagggctgtgcccactgaggatggagtttagcctgacacacagggtcttctccatgcatctagggctgtgcccattgaggatggagtttagcctgacacacagggtcttctccatgggtccaggactgtgcccactgaggatggagtttagcctgacacacaggatcttctccatgcgtccagggctgtgctgtccaatgaggtagccactagcctcatggggctatttaagttcacatttaaattcattcaaataaaatatatcttaaaatttaggcagtctctgagtcccagtggtcacattctaagccacaggttcccagaggggacaatgcagacacagaacatttccatcatcagaaagttctactggtcagcacagtctagaggtcacttctacagccccttcttctacccattctacggcggggggggggggtggtggtgggacctagcagccctttcaagagaggcaggtgtcagtgactgccagggtagctctaaatccgcttgcaagtttaagcagccacagttatggggatgtgggaagaggagagagaaccatggagcgagagcttgtcatgagtgagggcctgcactggcttctctgtagggtcgctcattaggtcccgctacactacaaatggggagtgccctcctcccccctcatccctctccaactcctgcaccctcctctctcctttccttcagggtccagtcggcccagctgttgcctagtacagaaaggttctgactcaggctcaggaaaccccaaggagtctacattttgaatagcacccaagagattcagatgtaggtggtcctcggccgcatcgagtctccccaactccacaccctctggctgctgtcttctctctccactccttctgataaagcttctccatacagttgcctacacatgctgtttcctcatctgtcattcacttttaaaatacatcacctttttgaaaaatacaaaaagtagcacatgctcattttttgtaaaatcaaacaacctaaaaatgtacaaaatgaaaagcaaaattctccattcctcagggaaatagtccttgacagtgtacccttccagatctttctctatgcacctgcagatacacagtgacacaggcctgaatagactttttcacactgtaagaaacaggaccatggcctatgaatgttttgcagttgctttgctcattcagcagcgtctcagggtctctttcctgtcagcaagagaggcccttactcgctgggctttgaccagttgcagagagctcaatgagaagtccacaccactgttaccttgtaccctagtgatggatgtttgagttgtcaaaaacttttcattcttccaaatgcagccatgaatgttcttgtaagtatgtgcttctgctcccctgcacatatttcttagtcccttcgtgagccacccaagtctcacctctgctgtcacttcaccaagacagttcctgccagacccaactgtgaccgccaggatcctaaacccaagggacacgtctcagtccttttctataactccactctctctgcaagagaccacctactctccggtagactgtgtggatggcccccagtgaatcccacttcccagtatttatgcccctgtgtagttccttcccctaaatctaggctggacctgtgacttgctttaatgaagagaatgtgttgttgctaattccaggcctaaaccttaaagagtcctggccgtttttgcttctatactcttgggaaagacagccaccatgtaaatctgattaccctgagactgccatactgtgaggaagcccaagctactcatgaggtgaggccaactagaagagaactgaagccccagacatgtcacttatttggagctgctgcagtcagacccttgctgttagagccaccctaactgtgctacatggagccacagacaagttgaccctcccaggcttggtccaaagtgcatactcttaagcaagtcacaaagtgatcaagtcactaatctttggactttttttttttttttacagcagtagaaacaaagccttctcctttcctttaatgcatttttgagaggaggaagcagaaggcaggagaggtcataatagatacctcatagctaagctggaggcacccccaggctcagggttcccagcgcagcattgtgtccaacccctgatgactgagccatgtctgtgtttctcctgggatgaagctgctgctgttggcttctcaggggagaagccatgggccccccctccatgggactgctcatcctcttcattccctaagcaaagggagtgagccagcagcaagcacccacagcatccctgggagcactgacccaggcccaaaagtcaacaaaccaaacagctcagaaagcacagagaggtcaggaaagttgccctaggtcacactgctagtgagaagtagagccagggctcaaaaccaggcattcaggctcagggcctgcaccagtgacccacaccagcgtttttctaatactctgattatgacctatagtaagaattatattttacaatatgcctctgctgtagatagatagatagatagatagatagatagatagatagatgggtttgggtataggtgtgtgtaaagtgtgtgtatacattttttttaactagaacaaaaaattacacaaaacaatatttactcttactatatataatgttttctcatatttttactctatttcattttggtcactaaattgatgtcatgaaccatgaatggggctgagacatacagttgaaaaaaaaaaaaaaactcgcctaaactgatttaagatggctctaaaatcacactgagtgatctgaatttgaatcttgctgaagcaagattccacttccaagttaagtgaccttgggcaatatggttgacttctttaaagcctcagtttccctatgggtaagatgggcataataataacagcggcctcataacagtgctctgagaatccagcactatgaacagtgcttggcccagagcctggcacacagcagacacgcagcaagcagcagctacgctgttaccacctcctcctcgggctgcagctcccagactcagcacggggctatgcacacagtgggcagctcgcgggcacactgagcctgcagccactgagaaagcaggcacgtgcccaggaccagctgaggcagtgggtgcctttggactttccagggcagggaggaagcagagaaagtccccagtgcccgctgaaaaggcaactttgttcctggattatagtagttctcttcaatcatctttttgcctttgaagggggaaagaagggtaaaacaacaaagtcagggtcaaaaactgtcctggaacaaggctccctctggaaaccaggcatggaatgggcatggcaccacacaccagcacccccaaacccactcactggagccaccgcaagccgaggcctctgagtgaggggcccaccagcccacgcagccttctgaagttagaaaaacatcctccggcctgagcccattagggaggctgtggcctgagggaagacagccccatcctgctaacagggtccttttatgctctgcctctcccctcctcaggaccccagctctatgctcaaggccagaaggcttgggcagcccagcaggccagccaatccgctccagggtgacactatttcttgtgactgagaggttctcctccctacctcttccaacctgaccagaaagctggagtccacagacaccagtaacacttcatggaagacttgcggcaaggagacaaggcctcatgacgggatgcaacatacagtggtaccacccagcccagcaggcactgcccactccctgctgctgcaccacatagttctgctctaacacctcagagactggaatgtggttccaagtcagacaccgagaaggaggctgaacactttctctgtgcaccaaccctgcatgcctcttgccctttgcacatcccgtgccttctgcctggaatatttttaataaacctttccccacctagctatttcctatttattctttgggtcttaacgacttacgcatcactccctaatctgaagtagaatcctccgttattctccttccccatccttttccttcactgcacttagcacactggtaccacactgagcacacatccaggtgatcactagcaaacaacactggcaagctgcaaaagaaggggtgacatctcctttattctttaacttgctgaaatgaacccatttctacccttaaaacaacccaatgaggtaggaaccattactctacccattccacagatgtgaaaactgagaatcagagatgagccatcacttggcccaaggccaccgagctggggagaagtgcagctgggactcagacccaggaagtctgattctgcaagttctaagcacacctctggcaccttctatgggcacatgctggtcttcagcataaagtctcccagcccacatctttgttttgttgtttgtttgtttgtttgtttgtttgagacagagtttcactcttgtcacccaggctggagtgcaatggcacgatcttggctcactgcaacctccatctcccgggttcaaggaattctcctgcttcagcctcccaagtagctgggattacaggtgcctgccaccatgcccggctattttttttttctttcttttctttctttttttttttttttttgtatttttagcagagacggggtttcgtcatgttggccaggctggtctcaaactcctgacctcaggtgatccaccaacctcggcctccaccaacctcggcctcccatcccagcccacatctttacttacccttcctgtgcctcccacattgctctcccaccagactgaaatacactgtgcacagcttcctggcaatgagcctttgcttggcctgcactctctgccttggatgcagcctgcatccagctctccctggctgggctagtgactctaatttgctgggcctgcctcctcatctatgcgatagcggaataatacctaaggcagttgtgaggattctacaagagaatgcatggaaagtattaggcacaatgttgagtccatatgatactcactcgtgtgtccttttatcactaacatactgcttctctaccaccaccaccatcagaatcttaaaggtctaaatcagcaaacacaagccagtgtactaacaggccaaatccagtcgtctgagtcacccaaagaaggtgttttctaaaaattttaattggttaacaataattttttaaattggaaaagtttcacataaaaattcagacagctggattttcttaatgatcagcccgtgtggcaacaccagggccatattcccacatggcagtgattggctggggttgagtggcactgcccccttgaggcagggtgtgtgttccccgggggcaccccggttcccacccctctcagatgtctcccactgagcctgtggcattcattcatatgacctctctggcccctgtaggtccttaagtttctaacccctgatctcagtcttaccattcttcaaatccctactcacatgcccacttccttcaaaaaaaccctccccaacctccacagccctgtgcttcccttatggttttataactttaacagttaacttgcactgagtacttcatgcaaagatccaaagtaaaatattagcctatcaaatgcggtcacatttaaaagaataatctatcatgacaaagaatttcggagggccaagaaggttgcactaggaaatccagcaatgtaaatcaagcatacaaatcacacaccacattagcaaagaatgatgcattccatctgcatcccaacagcatgtgacaaaattcaataattattcctgattttacaaagctcagaaagccaggagttgaaggaagctttcttaaacaaaaagtatcatacttggtagttattaaacagagtatgagattctaaccaatgcaatgagattctaaccaatgcaataagagaagaaaaatcgatgaaaggccatggggagagcttagttccactctcacagaggcaagaactatgtcctagtcctcacaatttccacaacaccctaagcacagcacgtgggatagataaagcagtcaaatatttgtggaatgaaaaacaccccagatgagttctgatccctggtacatgttctcaaaacatccagtactttttggaggcacatatcacaacttaaattgcacaacttgtttatgaaaatatttctgttttcctacaagatggtaagttccatgaaatcaaggccttcactctaggtaccaagcacaggtgtccctggcctaaagcaggtactcaatgcccactccaagagacatgagggcctactggagggtgcagggtgggaggaggctgaagatctaaaactacctgttgggtactgtgcttattacctgggggatgaaataacctgcacacgaaactcccatgacacacaatttacctgtagaacaaacctgtacatgtaccttgaacctaaaataaaagttaaaaaatatatataaggctgggcacagtggttcacgcctgcaatcccagcactttgggaggccaaggcaggaggatcatttgaggccaggagtttaaggccagcctgggcaacacagtgagtccctgtctctaaatttaaaaaaaaaaaaaaaaaaaaaaccctactgcagatgcatgaatgaatgcactcaatagatagtgctaaattatcatgatgttattctacttctcagctggagaatctgaagcccaggcagggagcctttggctgaggccacaccaatgtgaagccctctcagtaccctggtgtcctctgaaaggcgtcggccacacgcacacgccacagcccatgtgacttaacaagtaaggaaagcaaagcccagacccatgcctcagagccctctaaacaaacacatccaggacccaccccggcgggccaagccgccaccgctctgaggctggggatgacttcagtgcggagacctgaggctttcctcccagagccccacgactggtgcccacaaggctaaacagctcccttctgccttcccaggaagctatcaaagaattacttatgtctctggaagtgcttgtttagaaaaggttctccaccccacctgggcttggcaggagcgcagcatcaccaggctgcccttcggagctgctcaggcttgcctccagcccctggaggagctcagccatctttcacacagagagtcgaagccatgaagcagcgggaagcttcccaggataaacggagcagggtgacatcaaagtcctccttccagattaaacaactgaggccttcaactctcgcttgcgttccttccaggatattctgggctcctgcctcagttctccctccgatggaatggcagatattttgtttgtgagagactgaattttttccttcctcagggagagggtgggggggaagggacgtggggagggagaggaagagaaagaacgtctgtgagagacaagagcggcaaaaagaacacgtgtgagtgggcaagagagagggaaggcagggaggcagccagaagtgcctggtttggaatccaacaagtgatgtgaaaagtccaaaagtgtctaaatccaagcatcttgtgattcgcagccatggggctgcaggaccccccagctcaccagtaccggggggctgcacatcctgtctcggacagccctgctcagcccacatgggggaccctccttccataggcacaggcgcgctgcagttctggggcatgattagctctctctggggtttgctggtcactccctcttgttccctggtccctgaagagcctccttcttgagcagcaacctcaccccacaggtcctccgcagccctgacagctaagcttccagccctgcagctgacctcctcccccaacacaacagcagggccaccaaccccaacaggccaggttgagcccccaaggacctgtccatgacacaggggcagcacgctcgctgactgcccgccctgctccacccaacatacctgtccagggggacagacaggtaactcagatgtgccaagagccaccaatgcacgaggctttccacagacagtgccaggaaccacttccagttcccacaggctgcagagccatttggaggccacattcccttcttgattacccgcttgattccacacagaagcctcccggcaatccccaaccccatcctaccagggcagcttgagcctggggcctcggtcagctcttccccccacctccaactccttcctcctctctcctcagcctcagcggcccatcctgccccctccctcccagagtgcctctgtgtggtcctaggagtgggcctgggtactcactgctgctttgtccccttcatcagactggatgccacaggagggcaggaaccacatctctcttattctccactgtatccccagagcctggcccagttagggacttattaattcataattaataacaaggccaagtgtggtggctcacatgtgtaatcctagcactttgggaggctgatgtgggaggatggtttgaggccaggagttcaatccagcctgggcaacaaagcaagacccgatctctataaaaaataaaaatgaattagccggacacagtggcgtgcacctatagtcccagctactcaggaggctgaggcaggaggatcactgtgaggccacagtgagctatgacgccactgcaccccagcctgggtggcagagtgaaactatgtgtctaaaaaataataataataaacaaagaattattgataataatttatactaattcattaagctgagtgcctaaaagaaaaagcctggttccacccttccactccagacagaaggacctgggaaaagatggaatttggaagcaggaattaaaggaaagaagctgaccagggaagaggagctggggaaaaaggaggcagggagggtgacctaatctatcttcatttctttcttctttttttgctgctgacagttcagccttgatgtttcctgccctcgcggggacagtttgatcccagagtgtacctgagcttcctggtacaaacaacaacactgtccatcgatccatccatccccaccttccaacatccccactgggcgagcagaggaaacatcccctgagttctaggaccttgcaggacccacagcaggtgcctcctggatttgatttcccccaggtttcctacaaaaatgtgaatgaagagggtgctcttgggctctagagaacagaaggcatgcacagtctggctcaggggcatccagcctccttccccaagaagaaaagtctcaaagtgaggacaagacactcctcgaagcctctaccggagaccacatcacaaagacccattaaagcgctaagaagatgacacccatggccgccacccacccatcctgagggacctatggaaaaccagaaggtccccccactccccagcactctgcccagcccaagctctcccagcctctgcctcccatcccccaggaggaaagacagtgcccaggctgggccaggcagctggccctggtgcccatgagcagaggggaccctccctggagaactcgaaaatgccagtgaacaaggcccaaacacctccatcctgagtccttctccagccttaaagcaaatcatcttttaatcctgaaacaccaaatatttaatttatgctctacctcaaatgtcaagcccacctcccatcacatagctttgaaaccacgtaaagaagcctaacactttccatatggcaaagacatggggccttttaattgtgccaactggtatcattcaagggtaattcccttggaatctggcactcgggcaacagctgggccagcctccaatctcatcacccaaccccacacgtccccatgggctccaagtaagcctgcaccctcctcatcttctccaaatatcaaagtgcactaggtacccccagtcaaattaccaaactgcctggcagccgcctttgatccagaggcgggcttgcctgcaccacggctctcagcctatttcttcaggcagctctgctgtaaaggaacaaaagggccaaccggggccatggggagattattttaaatctggttgtacatattcacaatcagcctgtgagcatatacagaggcacacaggtcttcaccaagtgtttcccacctgatacctgagtccactgcactatttaatctatctattaagctttttcacttgtccattctattttccacacccagtgtttccaattggttttcttctctaactgcctgttgctgcttcatgtttccagcatcctccgtttctctctgagtttatgatgcttattttgctttctaattgtttaacatggtgttctttgccgcgtgtgctgatcagtttattgctcctcttccacagtactcgtgcgcctcccatttctcattccttttctcctatgagtccatattcccttggacttgctcatgtccccatggaaagggcaaaagcccagcccttggcctgcgtccctccaagtgagcctgccatgacagtgggggaggcagagagcctctagcattcttatcccagccctatcactccctgtttgtaggcccccatctccaaccctacaaatgtcttcagtgaatctcccagtaggttcccttccttcccaggttcaacagttataatcccatcataacccgccagggatgaaaatattattacacccattttgcagatgagctaattaaggtatacaagggcaaaatggtttgcacaggtgacaaatcactaggacagagcctgacctcatttatttctgtatttaagagggcaggcttagtttaatgccagcatggtcaccctttcacatctcaggaccctgcaggcaacttggactcatctgggacatttcccaagcccctcagacctcatcaggaaggaagagggcaaacaggggccactcctgcttctgcctgccccacgactggctcatctcgaagcaccccctctctgggagttttgtatgtagcaccctccaggcggatgccctggcacagggcttctctacaaatggcttctcctagaaagtgctccagaaagggagaaacacacagtccacaccagcgggctgtcaacactacaaggttatggggaggattaagataatgtaagcaaagtgcttgacacatataggcacttaataaatactagttatcattgcaataacaataatactagttggatgagccactgtgtctccagccacttagttgacaggccacgtaaaggactagaggcagagactagccccaaaacaggcctggggttggtgggaggacctctgccagcccttggaaaccagcagactttggagcccatgccctcctacatcctgatgatatcatggaagaacctaccagctaccccttcggcaccagagggaatcagggaaatgaactagcctgagggttgcccattgctgtcctgttcaatatcttagtgcttcccaaacttggggcattccattcccacattcacaattttgaccacttgtacttaatatttttctctgaatggacttcacgttagactcttttttaacttagcttcatcctaagcaataaaatctgcaaaatcatgggtttgatgtcctagttatttttttttctggtaaaaaaaaaaagataactattaagatttaaaatgttcccccagattccacctgaaatcacctggaggatgcctggagtgctgttccacaccctgggctccccctgaagttctgactccttatccctacctctgcagacacactggctgggccatctggggccaaggttggtgaaaacccaggcgtctgggtccccagcagcaagaacaactcccaaggagacagaggccggccccctgcataacaactttgatggctgcggcccaccctccaaccacctgacacatgtcatgccaacggctctgagcctcacatcttcaaaagtactttgaacaaacattaatgacctctcagcatttctctgagagagggggtgagggagagagggggacaggcaccatcccatgctgtcctcagctgggggaagaaactaggcaacagaattccgtgacttcaccaaagccacagacttaagctggggccccctccccaccctccctcacttcccccaatggcaactttagtggcctgcattcctctcgctgggaacactactatttaattaaaaacgacagacttttgttttcctctccctctttcctcctccctcccatcctcccagactggatgccaaggagacccaccaaaaacatgcgggtaacatttgttatggctttgaagataaaagtcaattgaagtaagccctcgctgtatttcaagttttccctctagcatggagcaagctgcctggcagtttagaaaaaaaagaaaagaaaaagaaaaaggagggactgcaaataaatgtcattctgcaggaatactttgtaaaaataaacaggctgaaaaaacccaaaacttgattaatggaaatccactcagttggcctctgtctggagctgtaaatgcatttgttcatacggctaaattagaccgttttcgttggcctttaaataaataagtagatcaaaaactagaaagggcaggggaagaaggagaggtttgtagttctctttttaaagggccccaactgcagtgccccccgcccaccaagatttgacctttactaggggacagcagctccaagtccgacccggccaacagaagacagagaagcccccagctaagcagtggcggtggaggaggacaggggagcttctcctaggcccagaggttatttcatccacacacaggaactgactttatccacaggtccacctcccgacaccagcactgcaagcgagctgccaggtcccaccacccaaatacaaacacatctgaagtctccactggcctctccccagcccatggataagaccaaagaactaaccagacctgagactcagtctattccccctctaagttaaaaaaaaaaaaaaaaattaaatgtcacatcaaaaagttgattcatcctttgatcctaggcttgcgcgagttccacgcagactgcctgaaagccccgtgcagagttccggagctcacaggacatctgtgaacgccaagtcccaggccaggagctggggctggactcactcattcccatcacacttagtgctcctccaggaactccagcctcagagacacacggggtgaaggctcagggctctgcccaggctacagtggaatgaggccctctatctcatatgccaagtaaggggtcttccaggtctcagtccccctagatctgctacccagagggccgcctgctctactggggttcctgtacaggtggtactgatgaatgccacagacaatcagaacatattcagatcctggggccagcacagctctgccttccacccagacacccctaatacccccttctctctagcccctactccacctccacctttgaatgctggtggcagaaacaaggtagaagtcagagcaggcccccaaatcccgccggtacagacacgattccccatcaactggaccttcaccacctccccacctaggacctttcccccaggcagccctctgcctccagctgggcacttcgaggttctccaaggcatgcgggcagagggtcgcgttggtggggcagggggcagctgagaagagattttcagacccagaagctgtgcaggaaagtgctcaaagttggggtgcatgggtttggggacccatctctgaggctgaaaggaggccaggaggtggggcaggggtggggaatcatacccgggtgcttcggcctatggtgcccgccaaccgcagctgtcggggtcccgagacaccgcccgggcagcgctgtctcccgatccactcctcgatgcccttccgagcccaggcagcgctcacggcgaagctgtcacctgggacggggacgacatgaagcccctgagtctggctccaggtgccaaaagttacccccgcggagggaagaaggaggcgcggtgggaggcgaaggaccacggcacgggggccaggagggggttcgcgggctggggcaggagccaagagagggacgcgggtaagtaaaggggggttcagcgaagccctaggagcgaggagccagaagggggcaagaggggtgagcagtaccccaggaggacgggtttaggatcagaccagggagcactggcagccaggactgcggaggagagggctgggggtcaggagaggggccgcagtaggtgcaggagccaggatatcggaagaagggccggggggcaggaagagggggcagggtcttgcggggaggcgcttgggggtctgaagagagggtgccgtgagagccgagggcagggacgcgggagggggaggggttgagggtcagcggtgggagcgcaggaccgcggggagcgggtaggagggacagaggagggggcgcgaaggctgctcagggagcgggcttggggggccggtggccggaactggggcttcggggtggccctggtcataagacctggcgggctgggccgttctgccgcggccgcggtgtcccccgcgtccatccccgaggtctgcgccccgcgcgcccctaccttccgggctctccctgcgcttgcacacggcggctgcaggcacatcgcgaggcggcggcggcggcggcagccgcggcggcgggagaaggaaagaaaggaagggagagagttagcgaccgcggcggcgacggcggcggggcccggggcgagcgcgcgggcgggggcactgacccggcttggagtgaagtttccccatgctggggctgcggcggccgggagcgtccctaagccatgcgcccggc

SEQ ID NO: 986 - DNA, 3873 bp, Homo Sapiens
gaggctaaagcgcaggggagggctagagaccttcagcgctcgccgacggcccgcccctttcgcccgctgcgattggctcaaatcctcgacctctcttttgattggcgattagggcagtcaaatttctctcggctctgggtgcgcggagagtagggcgggggattggtggggggcggggagaggagtcaaactgacgtgtgaagcgggtgagccaggcccggctgctcagtagccactttctgcacgccgtgccaactccgaggctagcctagttgggtactaggggctctgggttctcgcatttatgaagcagtgggctcctccactctgggaattcgagctgttggggagactcatgggcgagatcccccgcagccgagggcagtgaggtcagcaggtttggcagggctgagtctggccgagctgtcggaactcagccgatcccagctcgcatctggcccccaggtcagggcgtctggcgactcctccgagagcagccccggacaagcttcatccctctcccaaatgtaacatttgcttgaaactttccatgattggctactacccagacgtgaagtgttttggaaaaaatgagcaaaatcctttcagctatgcgacttaagccatgggagggtggaggtggagggagggcgacgagtggcgaggcggggtgggggggttgcggaatccagaatacgacagctttcttttttaaaaattattttttttaaatgtacaccgatacttcaaaaatagttttgaatagcaatgattccgttaacgctatttgcttgaaagcaaaactgtagatacttttctattttaaaaactgcttcactgttttaaaatagaagcgttggaatacgggttctctaagttatttcagcatcactttatccatttatccttttggacctgtggaaaaacagccaagaacctgataaactgagttattccctgaggctacatacacattacattccaggacaaaaaaatgtttttagactatttcctgaaacaattaggtttaaatggagtagatccacagagtttaataagatgttttgggggttggtgtgttgttactgtgttgttgtgtgtgttcgttttgagaaagggtctcactctgtcgcccaggctgaagtgcagtggcgcgatcacggcttactgcagccttgaactcaggggccccggtgatcctcccacctcagccagcacctgcttttttttttttttttttttgtatttttggtagagacggggtttcgccaggttgcccaggctggtttcgagggatctgcaccccctgggcctcccaaattgctgggattacaggcgtgagccaccacgcccggcctaatgaggtgatttttatgaaactagaagggtgtatgtcaggtgcatcattaattgataaccggatttagtaatctagtgaactgtaaaatatttcaatagattaataattaggaaatctggctgtacctacaggttatgtgacctttggcatgttacagccttgccgtgttttaagttttttttttctatctgctctttaaccagaagaacatggaaaaaactatcatgtgtaaaacatagtcaccttttttatttaaaaaaaaaaaagcaggacaatgggaaagtacttagatagcttttattactaatgttacttgtccaaaaatgttgatgaatcaaagtaatgatatattcaggaatagagacatcaagtttcagaggaaaggtaacaaatattacccctgcctaaccctgacttgttaatgacttgcagactttaatattgtccaatatattagctgcaattagttatcaattttaactgcctcttttttctcaacaacacaaagcaactgacaatccagttactgttttcctctcagtttctcccttaatttctctgagtttcttatgaaaattgttttagatatttaaaggtttaaaggctttatagttcacttaacaaataagaaagctaacctagtaacagattattttctagagtttctagtttctagagttttattttctggtagtttccagactttctgcttttggtgagaatggatagatattactcccaaaatttggaagaattgagtccactgaaatttaaccccttgtttgagaaggctaatgaaaaggttatagacagcaaagaaactattataaatagaataaaaatgtgactcaatactttcatttgattcttttcttcatcttatataattttttaatctttaaagatatttttatctacaactttgtaaccattacacaactttgaagtttcagttatgttaaattgaattatatcattacataaactcatgtaatcatcatgtaaaaagtataaaaacatttgtatacatacaataagtagtccaccaaaatatctacaaatagaaaaatgctctccacattaactatggttgggttgtcagatctactcttcgacttcctttttgctcctaagtgcagctacactacaaagagttgctgtcccatagccatcatcaggtaatcagccatcaaaaggaataattggaatttgtgcactttgtgtctgttctaacttgaagaaaggttcctgtgcttctatgttcctgagcttctttgttctgtcgaagattacaaaaggctaatgtttcaagatcataataaaatccatatataggccgggcgcggtggactcacacctgtaatcccagcactttgggaggctgaggcgagcagatcacaaggtcaggagattgagaccatcctggctaacacggttaaaccccatctctactaaaaatacaacgattagctgggcgtggtggcacacacctgtaatcccagctacttgggaggctgaggcaggagaatcactcaaacctgggaggccgaggttacagtgagccaagatcgcaccactgcactccagcctggcaacagagcgatactacatctcaaaaaataaaataaaataagataaaataatatatatatatagaaattccagattgcgccttcacaaaaactagtagattatttgttgacctagaactaaaaagaaagtaattttcctttgactaacagcttaaaagaattgcctaagcctttttttgaaattcttctgtttggagaatagagtaaggttcaggaagcctctaaacaagcttctgctactacttccctttcttctgttggtttcctgctttaactggccaaattcctagcctcactgataagccctgccaaacatggcttatttttccaatactgaatatagatgtgtaccaaagtaagtatggtaaatccctcatctataaaaaggggataatatggccaggcaaggtggctcacgcctgtaatcccagcactttgggaggccgaagcaggtggatcacctgaggtcaggagttcaagaccagcctggccaacatggtgaaaccccatctctactagaaattcaaaaaattagccaggcatggtggtgcatgcctgtaatcccagctactcgggaggctgaggcaggagaattgcttgaacctgggaggcagaggttgcagtgagccgagatctagccattgcactccagcctgggctatgagagagcaagactccatctcaaaaaaacaaaggggggcggataatattggtacttatagggttgttgtgtggaataaataaacaacacatataaagcacccagaataatgacagtagcactctgtaagtgttatagctgttattatcaaaccataggtgaataaattttgacatgcaatgtgatcagtttttacacttattgttgaaaagccaaacaattgttttaaaccatctaataataaaataccatttaagggg

SEQ ID NO: 987 - DNA, 1372 bp, Homo Sapiens
atgctagcaattattgtacccacaattatacttatgccagtgacacgatattctaaaaattctaaaatttgaattcacacaactatgcactgcttactaattagtttcatcaaattattcctcttaagccaatttagtaaaaataacctaaacttttcattagtttttttctccaactcactatcagcctccatttcattatactaacaaattgattacttcccctaataattatagcaagttaacatcatctctccaaagaatcatatatatgaaaaagctacatatttcaatattaatctttctacatttattcttaatcataacatttactgccacagaactaaatctattttacattctctttgaagcaacactaattccaactctaattattattctctgataaggaaacaaaagagaatgattaaatccagggctctatttcctgttctacacactaattggttttttacctcaactcgtatcattaatttttatccaaaactccacatactcattacactttttaataacctgttactgtgttcaaactcagctcttgacataatagtcttttatgattagcatgcattatagcatttatggtcaaaatacccctttatagtttctatctctgactaacaaagtacacacagaaactccaattgctgaatccacagtttttgcagccataaaattagcaggctttaatataatacgaattactataattccaaacccactaatggaatatatagcttatccatttcatatagtatccccgtgatgaataattataacacactctatttgtttacaccaaatagacttaaaatcacttaatcacttatcacatattcatccataaatcatatagcactaacatttatagccattttcatccaagctcaacgaatttttataggagccataaccctaataattgcccatgccctcacctcatccatactattcttcatcacaaactcaaattatgaatgaatttatagctgaaatatgctcttcattcaaggactgcagacattactccctttaataacaacatgatgagtattagctagcctaaccaatctagccctaccaccaaccatcaacctaatcagagaactatgtgtagtcacagcaccattttcatgatttaattttaccattattattaataggacttaatatattaattatagcctaatattccctctgcatattaattacaatgcaacaaggaaaatttaccaatcacattaataaattagccatcactcacattagaaaatgctttatacatctacctctgctactcctatcacttaatgacaaaattattctaggacctacatactgtttttaa

SEQ ID NO: 988 - DNA, 2590 bp, Homo Sapiens
ctttctggagtctgaaatgttaagtatggaggcaaaagctgaagctggagcaacagtctcagaatatgacaacaaccatgagaatggaggccattcatagcagaactacgagacaagaggagcctaggtccctgagctgcagaactgcatactaacctgatgagaagactaatgctcagtgaggtgaactccttcagggccacaggctgtaaagatctaaacaccatctgatccagtttcaatatgactgcctggatgaagaaggatttgagactaagtttattcctccaaagcaaaccaactgagaatgcagggggtcttgctatgttgcccaggccagtctcaaactcctgggttcaagcaatccactcgccttggcctcttaaagcactgggattacaagcgtgaaccaccatgcctggctgaagattcaagtttttaaaacatctgatttccacttgaaaccttgaattgtatcattggcaacaaataatgtcagttattttccttgagatgacaacttcacttagttattttcaagaaaactgctgccatgtagccaactgtgaatgaccacagtttgcctgtcagtcattctgtcaagtaaaatggtgctcctcaaacaaagcagcacgtttagctcacaactcaacaaccacacagcagtcttcctcccacccaccatggcacttatattaatataagcagcagaggtgctttatgtatgagtattgtgtgaaaatactcaaaagacctgtaaccaagggtcaagattactacaattaatttctactgcttcctaagggcattcttaagtgacactagcatattttacaagccagagtgtaacaatgagcacaatgactgctaccacagcttgctgccagccattgccttgacttgtcctaaaacacagccattttcatccgcctccatggctactgcatcatcagtgcaaagtcaacccagtaaaaaaggcaaatagcatctccgtgttatcataaaaatagttttgacctcatggctccccttaaagggcttggggcatcacagagagccactgctacagccaactgagagagaactctcaaaagccaggctttttctgtccctgtccttctcacagtgaaacacttaacgcactctctgattgtggctcttaactcgccaggtaaaagtccttctgtgtagtctaggaagaagggcaagggcaaagggaggactttgtttatgaagcctaagtagaatatgctctgctagataatcagtcctggaatgaaggaggggagaagtgagtttctgattgtctgagcccaggtctgatgttgggaaatgccagcattccaacccctgatttccattcccactaccagacttaggcaaagttactcacccgttcttgaccacataaatgtatgtgtgatggctaattttatgtgtcgacttgactggactaaaggatgcctggatatttctggaagagactaagatttgagtcagtagactgagtaaaaattgccctcaccaatgtgagtgatccttatccaatctgtagacggcccgaatggaacaaaaaggtagagaaagggagaattcactctctctaacccggaacagccattcagccattttctccttcccttggacatcagcacttctgattctctggcctccagattatgactgtgacttacaccatcggcctctctggatctcaggccttccagtttggactggaattacaccaccagctttcctgggccttcagcttgcaaacaggtgattgtgggactcttcagcctccataatcacacgagccaatccctcataataaacctttcctggccaggcgtggtggctcatgcctgtaatcccaacactttgggaggccaaggcagccagattacttgaggacaggagttggagaccagcctggccaacatggtgaaaccctgtccctactaaaaatataaaaattagcgaggcatggtggtgggcacctgtggtcacagccactgaagaggctgaggcaggagaattgtttgaacctgagaggcggaggttgcactgaactgagatcatcccactgcactccagcttgggcaacagagcgagactctgtctcaaaaaaaaaaaaaaaagaaacttttttttcatatctctatatgtgccattggttctgtttctctggagatccctggctaatacactatataacaattactccctttgaaaatcaggaactcacagatgattcaaagtgtgacctacacttttcttgctgatgcctggccataggcagcagcgcaagactgtgtctctctctcaatctctctctttcacatctcaggtttctatgcagttagaaaagctacttttctagaatcactttttcctaagtaatccatatcacatctgttaggaattactaattaataagcaaagttaaccaaaaaaagagagtattataaatccatctttctattagattgtgataactgcccccttctattcattatttcctgtaccaaactcattttgtaaactaagatcaagtctaataaaaaaattcttttttgttaagtagcaa

SEQ ID NO: 989 - DNA, 1789 bp, Homo Sapiens
acccattatacccactgcagtgccagcacacagtggttggataactgcatacctctgagatgcatgaaaagcccaccccttcttgctgggactatctgagatagtgagtgtaacttgaagaaatggtacctagcctttgtccaggcttaggatttgaaaaaacaaataaacataaaatagaagactccttttttactttccttcttatctttaaatcttaacctaaaatcttttttttaatttttaatttttgtgggtacatagtaggtgtatatattttgggggtacatgagatgttttgatacaggcatgcaatgtgtaataatcacaccatggagaatggggtatccatcccctcaagcatttatacttcacattacaatctaattatactcttttagttattttaaaatgtataattaagttattactgactgtagtcacactgttgtgctatcaaatagtaggttttacttctttctgtttttaatacttattaatcatccccacctttaccccatacccccactacacttcccagcctctagtaaccattcttttactctctatctccatgaatataattgttttgatttttctaagaggacatgataagtgtttagtttctttgccaatcagtatccccgtaattttggaaatgatgattctggaggctgggcatgtcatttttgactgaccatctggttcacttactggtgccatgaaaaatctgcatcatcttaccgcatcattgactacaaggagaatgtgtcaggtctagatgtgttttagcatgaccatcaacactgctaggactctggcatagttgaatgaacaatgcatccagatactagatgtgggaagtccagacttggttctgacgtgtgggacaagtcagctgactcttccaagccaccaagtccacttgtgctaaatggtggcatcatcagattcagtgagctattccttcctttgtccttgtatgaaagttgagatttactttttatcagttatttaaagatctaaattacacagcaatgacaaatgtgcttctatgttcaacttcaacctttggaattaactagctttccaggtcttactttgttaaacttaggtcatgatccacaatgttctctccaggttgatctgttcaagtcttggacagattttggtatagctcttctaggttcctccagacaccccttcccatttccacagtccctggaatcagtttcagtatacatccttcactagacagcaggaccacagcctacaggctctggagtcatcttgtcctgggggtgagttctggctctatcccttgttagctgtgtgatttcatggagatttccaaatctccctggaatgcagttacctcctctgtagaataaaactaatcccagctatccgtcagagttgcaatgaggctaaatgaattcataggcacaatgaatttgcccagctaatgctgatctactcctacttgttccttcattctcccaaatgccctctcttctccctcctgactcatcttgcttgctaagtcatccactgtttatttcttgtgcctccctggaagaaagatgacatctgcttcttgtctgtaagcctctgttgtgatttcttcactcttctctacccacaagtatttcctttctggactcaccaacttccttaggctgggatgcaccaaccttcacattctttgaagaagagcctgtggggactccatcccagtgctttgagcagcctatccctccttgctcagtctctacaattgcatgctagc

SEQ ID NO: 990 - DNA, 6262 bp, Homo Sapiens
agttgccgctaggcgaaagtggggaccgccacacagttggctgcggattaaaggaaaatcaatgtgacgttaagcaagacatttattgtgcccacagcttcaccattctggtctctatgattccctgcgaagattgctgttatcccccagagacacagctgagctgtctctctaaagggcctgtgttctactcctgaatctggtttcccctaagcttttatctcaccctggtgacagctcagaaacacacaaactctgtgttaagaaaactaagaagtcattcatctgcacatttcccgaaatcccccagaagcccgtattagactgaatggtgtccttattgcaaactctccactttagccaaggtgcaaagtcctcccagtcccccaggagcttcccttctctgagcggtacttaagttttctgtaaaaccactcagttcaacaaatgagcttctcaatcttagtttctgcttgttgactttaaagttaatctataataaacacactgcagtcctcttccctgactcattgtccactttgtccatttgtgtcctcataccagattgtctcaattctcttaactggtgagatattatgaactcaaagcattttgcacaatgatattccaacatgctgcatgcaacaagcagacaataagtaactagtgagggaaatattccctcatactcaagagaaccctttatacatttttaaatattttagggccaggcttatgcctgtaatcccaagtactcgggaggctgagatgggaggatcacaggagcccaggagttcaaggctgcagtgagctatgatgatgacagtgcacttcagtctgggtgacagagtaagactgtctctaaaagtaaaatatcttaatactgtacctgacatctgactagatgtacccagcaaccactatgtgccataatctctggataaattctatgaacattcacttagaaatagctgcaagtccctgaagacagtatgacaaatactgaggcccacagtttttgggtgatcagttgcataaaatgctaaaatagatggttcctgttttgaatgtcactttcaaacatagaaaaaaaaggaattctgctgaaaaatcatgaatggaaaaaaatgttcatatttgttgaagctggatcatgcatagagtttattactatttgtgtttccacaataggctggatgtggtggctcacgcctgtaatcccagcacttttggaggccaaggtgagcagatcacctgaggtcaggagtttgagaccagcctgaccaacatggagaaaccccatctctactaaaaatacaaaattagccgggtgtggtggcaaatgtttgtaatcctagctactcgggaggctgaggcaggagaattgcttgaacccaggaggcggggaggctgaggcaggagaattgcttgaacccaggaggcggagcttgcagtgagcagacattgtgcgccattgcattccagcctgggcaacaagaatgaaactccgcctcaaaaaaaaaaaaatccaccatcaagttattaaaaacatataaatatatgggagaattccaaaatcaccccttcccatgacccatatggagggacctacaaacatgaaaggatattaccagtgattaggttactttacctggcagttaacttgaagggagattaccctcattgggcctaacctaatcaggtgagtccttaaaagagttggggctctacctggaggagactggaagtgtgagagggatttcacatgagggagtttttctgtttctggctttggcgatggaggggaccccatggcaaggaatgctggcatcctctgagcactgagagtggctcagccaacaaagaaatagggacctctgtcctacaactgaaaataactgaattccaccacaaccctgaaagcctggaagaggacgccaagcccccagataaaatgagaagacagcctggtcgacaccctaattccagcattgtgagaagctaagcacagtccaggtaggcatgcacacctgcctcgctttgacctgcagaactgtgaaataaatgagtgttgttttaagctgctaaacatatggtaatctgttgtacagtgagtgaaaacgaataatatataatacacagagcatgaagacaaaataaatctaaacaaatgccctgtttatttatattttattaataaagacaacagaagaaggatgaggtttcaatattttattcaagttttttaagtgttgttaattacagcatttgaaggggaggatctaattccaacaaaatggaagactctaaaatgtacccattaaactgctaaaaaacaaattgagtggtgagaatacaacagaagtccaatttagattctgagtgttgtcaccatgtgattacaatcacacagacacttccaagcttatagctggagctcctggaagctatttcatactctggtgcaagggccaaaaaaaaacacaacacaagaaggaataagtcctgaattattggcttcatcacatccaccttctccaccccaaaatggcacaaaagaaacagttaccacaccctgcagaccttttggtgtaaaagagatgatgatgaactggggtgggaacaggtcatgaagatctgtctaaaaaagtcccattcaggtgagtttgtacacaccatcaagcagcgagcctctcatcaattagggttagggaaccaaggttcgattctcaggaaatcacaatttcattcatttactcaatatgaatttacaaagtgcctacatattatccgcttccacttgcagccatttctagataaaaaagaaacctggcatctcaaaggggccaccaagttctccccgagtctaccactgaaaggaccttttttggaaataggtttcttctgtacctctggaagggtaacatcttaaagctgaatcaactttaacctggagggctaacatatttagcaatacttgcatcccagacatacaacattaaaagatacactaaattctgaaggtagctatgctgcaaaatagtttaaaattaaacaattgtacagtattcatttatgcttgaaattccagtcctagaccaagcttgtggccaccagcattgacgttcttgccatccagaagagctgacagtgtcagtttaatacctggctttagagtctgagtgtatcctaaacctatcaggctggagttgttcactttagcctaatcaaggaaatgacaaaacagagaaaacattaagtataatactttgcacttccatctccaaaattagagctttttagtcaaccaaccttggactttagaatcaaaatttttcatgaccaccttgttcatgagattcattaaattcaatacaaaatacatcaattttaggtgcatacctttctgttcaaagggtgtgctgagatctgacacccctcataagaacaaagcagagagaaggaaggcctcttaggggccagtgtccttttgctcatataaataatgaggctccttttctcttgtttttaagtgcttgctgttaagggagccaaattcggttctagtttaggagacttaaaaagggctgtccataaattacacaaaccagtacagacaccattctgcaacatgagattccctcatttcaccccaaagagatacagccgccagtgccctgtgacaacagaaatgagcccaataggatttactgcaaaaactgtgtagtagttcgagggcctgtgagcaatgccagagactctgcaagatgccaactgactattgatttcttaatatgcaatgcaggagctgaaaaggagaatgaaaagtgaggcggggcggggggaattatcaattagaaccctagatttcagagtgccccttttaacagtccgcatgatagaacaggaactggtattaatggaagaggcttaacagtaagccagtctggttcaaatccagctcccagcactttcctgctgtgtacctttgagcaagttactcacctaagtttctagttcctcatttgtaaaaacagagatgattggccaggggccatggctcatgcctgtaattccagcattttgggaggccgaggcaggcagatcacctgaggtcaggagttcgagaccagcctgaccaacatggtgaaaccccgtctatactaaaaacacaaaaattatccaggtgtggtggtgggtgcctgtgttcccagctacatgggagggtgaggcagtagaatcacttgaacctgggggacggaggttgcgcagtgagctgagatcgtgccattgcactccagcctgggcaacaaagggagactccgtctcaaaaaaaaaaacaaacaaacagagatgattggccaggcatggtggctcatgccttgtaatcccaacatttgggaggttgaggtgggaggacagcttgagcccaggagtttgagaccagcccaggcaacagagtgagacattgtctctactaaaaatttttttttaattagccaggcatgctggtgtgcctatagtcccagctacttgggaggctgaggtggcaggattacttgagcacaggaggatgaggctgcagtgagctgcaattacaccactgcatccaacctgggccttgtctcaaaaaaacaaaaaataaaaaaaacccagagatgattaaaaaaccaaagcacctatttcaaatgggattaaacacagtaatctacacaaaaggctctgcacagtgcctggtacccataagaagtactagtagtatgatcactgtactcatttggcactcttttcaaagtgagaacatctctcactttgtttttgtttttttgagacggagtcttttttttttttttgagatagaatctcactctgtcacccaggctggagtgcagtgacacgatctcagctcactgcaacctccgcctccccggttcaagcaattctcctgcctcagcctctcgagtagctgggattacaggcacacgccaccatgcccggctaatttttgtacttttagtagacagggtttcaccgtgttggcgaggctggtgtcagactcctgacctcaagtgatctgcctgccttggcctcccaaagtgcagggattacaggcgtgagtcacggcgcccagcagcatctctcactttgagtaagctgaagcacagcactccagcaaacctgaaggattccaacataaagagcagatgggcctgcctgtgagatgcgtgattccacagatacccaccgagaagcaggcgtcagggtcaatctgatacttggctgctattccgaagcgcgtgttactgtttcctgctgtccaggcaagattgacagcggtctccaacttcttgttcactttctggtaaatggagccgccaaactctgtcccgtcattcctgcaaacaagcacaggacagatgctgagcttcccagggaggtgagctgcagcccagacagatccacccaagtctcccagaagacagggatgacagaaatggactgaaccaatactggtattaagggaagtcagaagttcaccaaatttcacaaaacaggtactaaattacaggaagtctgataagtatggaacaggcacctagccaggcacagtggctcacacctgtaatcccagcactttgggaggccgagatgggcagatcacttgaggtcaggggtttgagaccagcctggccaacatggtgaaaccctgtttctactaaaaatacaaaaattgaccgggctggtgccatacgcctgtaatcccagctactcaagaggctgaggcaggagaatcgcttgaacctgggaggcagaggttgcagtaagccgagatcgcgccactgcactccagcctgggcaacagagcaagacattgtctcaaacaaaaaaagaaaaagccaggggagagggggtacgtggtgactcacgcctgtaatcctagcattttgggaggccgaggcagcaggactgcttgagcccaggatatagcttgggcaacagagcgagatcctgtctctataaggaaaaaaaaaaaaaagaagcagcaagtagagcactgagattctgagtgatttatttttactgctactgatgttattacttttataaacgattctaccagaaaaatggcatggaagtccgggtgcagtggttcatgcctataatcccagcactttgggaggccaaggcgggcagatcatttgaggtcaggagtttgagaccagcctggctaacatgatgaaaccctgtctctactaaaaac

SEQ ID NO: 991 - DNA, 4518 bp, Homo Sapiens
aggagagcatggaacacaaccctcatttgcatcccacaccctagaatctgcaaggacatgacagactggaaaatatgctttcacaaacccaccagaagtgaagcttaggcagcaaagcccgcagcttccgggacagtcacatgagcctgagcccagatcgcagcacatccagagaccagagccaggccttggagttctgtgacagccactgcaaatgactgtgggcaccgcaggtctccaccagccctgtgccaagccggtgaggatgccctgccatcttcaaggctcactgaggcggcgggctctgggtgccctctggctgctgctggagccccctgcagagcccagatcattgcccacagagagcttctcattaagagctttcagtttataatttcttggttcctagaattttgtagagacttagattgacaggattctggcatgaagttaatccgcatctgcaacaggctccaaacacgacccacatcccggccccaggcatggggctagggcccaactgagctgggcaagatcagttattcgttgtcttcagaattcatgtttgtaaaatgcgggacccatgtcttggaggggtgacaggagcagtgtttagagcatagcacagggcccgtgcccatcaggcgttattgctgtgagctgcctttattcgtgctcaagttatcgaatgtgaacaagtttagtgtcaaaaacaagaagtccaacaccgtgatgcaggattcatcgaatgtgggcgtccctgccacctctccactggcccctgtgacagtcgatgcctgatgtcacctgtcagttcaatgtgtaaaagcacaaaagtagattcctgaattgtgtcaatgccacagaacggaaggggatggtgctgcaggttattcctgtgtttctaggaaggcaacaactggatagaatcgggcagaatggattttgtctagtgtttgatggaaataataaccccacatggcttgtcatacacacaaaatgcagagaaatatgcagcgttctggagtgtcctgcacgctgtcacatgggacccccatccactcttcctatcaaaaggctgatggatcatggtctctgcagatgcaggaactgagctcagagagaggccgtgtcttctccaagacccccagccaatgagagggacccaggcctgagcacaggtttctgaatcagagtcctgcctctcaccttctcaaacgtccttgcttcccttcccaccaagttttaattgagtgcaccaggattgcggtcttccaaaggcatttatgtgattgccttttcctcttcgatttctcaccagttagcttataaatgacaaagtctgccccgtggagagagcgttctttagattttaatagaaagacatcaacatcgccatgaaaagatgaagacaatgaaaataattatttagtaggataataaacggaatctgggcagagtcgtgctgagcagctatgacttgcatcagcgcatcatggactggcagcaactcactgcgcagaatgtccgggccacaggcttgggctcccccgacaccccgtttcccatgggcattttccctactggggactaacatcagatgggttcacactcgtgaaagacgctcggcaccaagaaacaggtgcctgcagggctggtgcgacacagggactctgtggtgtagtatgtgtggctggtcggtgtattagcgaggatggggacacgggtgtccagtaaggagtgcttgaacgaaggtccttgattcacaaaacaggaacagtgctgaccgcccgccctcctttatcccaggaagaactccaactgacatagttacaaacagcatggaatccaaaccttaccctcatcacaccgtaaataacatctttgtacagcactttatgatttttaagtcaccttggcatataaacatacatttcttttacataaacacatgtgcatatgaagaggatatgtgtgtgtgttcacaaaagtcacgtctatatataggacatggggctggttttggtaaagccccttggagaagggcctaggtgggagtcctggctcaacccccaggtcagctacttgtcttcgggtctgaccctgaagccagcttcccacatccccaccctaaattgtatcagggatcctgagaagactaaggcagtatggggctctcccagcagggaacctgttcctaattcagagctttgcacccagggcctttgggcgtctgtgtgcctgctgtggatgggagaccctgcccctgcatcttccacggagagggtacgtagctttcggcagaccacaagacgctggaagtgaaggacacccctcctttatttactctgaaagttctgtttgcctcactagaattctgcatcataagaactcccggacttgtatggccccactgtgatggctggatctcagctccccacagcccctctgaggcagccagggcaggtgtccttatcccctttgtatctgactcctccaacaaccctcagggtcaatgatccactagaaggattcacagaaccttaccatttattacagaaaaggacatagattaaaatccgcaaagggaaaacgtacttgggacagagtctaggagagaccagctgtgagctgcccactgtcctgtcctgagggagccacgaatgcacttcattctcacagcaacgactgtgccagtgtgcacacagcaccacctgccaggggagcccccgagccttgggatccagggcttctcctgggagcgggtcacataggcctgcatcatcccgctggctaatcctagtcacccagtccagctatcccagaggtcacactgatgtagcgtggctctaggctgcacacaaatcactgttaacatgaactccatgaactcttggccatggatggaggtcgctggtaaacaaagacactcttatcaagcaagataatccaagggctcaaagggtatcctctgggaaggacagggccagaccttcctctgaacgtgcagggtttggacaccccaagcctgctgagtcaaccctttactgcacgtccttgtgcaaatgagaaggcgcaccaggaagtgtaatcgctttcccaagtaacacagttcttgaggccagtaaacaataaggccacagatactcccaatgcatatttaggaagggtgcagtgtaggatgccttgaggttttccatgagcattgctgaatactcttaaaatccagagacctgtgtcagccggggtattgtttcccgaggctagatataaggctgacatagtcaaacttgctggctacctctcaacacagcctgggcccaggtgcgcacggtcctaaaacaaagaagtacgagctactcttttgtagtagaggaggcttctaagaaagtaaaatataaatgactgtattggcattttcagcatctgttgtgaatctagtagttcccacaatgggagaccaccacacacctgtgcagggcagggccgatgcttcacacctggagaactgaaccaggtgccagtgggaactgggcggacagggacggcagcctcactggggctttagaatccagagaagcccatcaggccaagggaagggagtcccagtccccaggcctcatgtggggctgtggtcaaggcacaccctggagctcaagggtgaagggtacagactttgggatgggaagtgtctggctttcaatccctcctactccacccccaagctgcacagccctgtgccatggcttcccctctttagccacagctttcatctctaaaatgagtgtaataataataataatacctgtgtcgtttttctgagaaataaatgaagtagactgcatgccaatgtggaagacagccgtgctgggagggtcgtctgccttcagtcagccctacgcggccccttggacccaggcctcagcagcgtaagaccaaggccctgagtgctcacaggagatggtccagccagcctcaggcctgttgggcagctgcccaggctcagacagggcatagctgctcgggcagtgaggacaggtggttggagcttttctccagacacaggtgcagtgaaggcctgggttactatgaagcatctaccgaggggcaggtctcagggcctccaggacctgagctcttccctggtgcgggccctggagctggtgtccatcgaagactacggggcacacgccctgggaggtggagaattagccccgctccgtcatgctcctgtgtgtgtggtgcgtgtgacttccttttaaagagaagagtgtgcggaggggaagcttggcgggcatgacctccaccaggtggacaaggtcagcatggtcagtgacaagtcacatcgacagcactgcccttgactgcctgtgacaggcatagagctcatctttggggtcctcctccccgaaacccacagccccagtccgatcttgagaaaaaacatcagacaaaaccctcctccaaacagccaaggtcattagaaaccaggaacgtctgagaaacggtcacagccta

SEQ ID NO: 992 - DNA, 3485 bp, Homo Sapiens
acttagatatgcagctgaaggggttcctgggtttatttctcctgagaactggcatgggctctgagttttgccattcctggcttcggtcctagcattctaagctgcctgaccttgggcatttgtcaacctgtctgaaccttagtatcctttcctctctgtagagtgggaagagatggagtctgtgaagcgcctggtgcaagctgtactaatacacctaacaatgagctcctccctccctgcctccttgcctccctgcctccctccctcccatggggaggccagaatctggctgcttgctgccacctagtggctctttggggtcatcttccctcataggaaccacagatccagtagcctagagcagaaagggaaggaagattcaacctaggggtgtttatgtttaccgtgtgtctggcactcgtggagatagtgcatgggactacataagtaagacagcatcgaagaggtgtcttggagtgtggttaggagcgagggctctggagtcagacaagctacagactagctgagtgaccttggggcaagttatttcatttcactgtgcctcagtttccccatctgtaaaatttgtataacgataacctacctcgcgtatctacagtgcctagcatagtgccccacataaatgtgttcactaaatgtacgtcgttattaatcataggagcttgcagtctcactagggccgactggaaaactattaagtgatcctcaaagccacaggcgctcagagactggagagatcaaggtgcagaagactcagggaagggtagtcttgagggcagctgcccttaaagggtgggcagcatttagtgaagcagatggagggaagttgaccggcatcccagatgtggggaagaggccagcagcctagtctcctccacggcccagcccccactgtcttaccaaagaacagctttaaccaaacccctctgggcatcaggaccaccgctacacctcttgccaggctgcagagctatgcagtctggaggcccagctctcgtcagaagctggggcatgggctctaggggaacctggggtcggatgagcccctgagcaggtggcaggtgcctacatgtcccagtgtgggttcgtgtttgtgtaaggctctcctgcccccacccccaggcaccagcacagcctttgccttcactctctcccctcccctgtccctgggggattgaataagggaagctggggttggccgtccttctagcttgattggcagcaccagcgctgtgacggaaggatgtgttgtgccagcagcctcttggccgcaggacaaatgcacatttaaagagataacctttttgtgtcctggctgggaaagaggtcagtgcagatgtttttgggtccaggtgttggctgtgagttttcctttcctctatgaactgacctcagcagcctagtggacagtcacctccttacaggtgtaaaatccaagccagtcaaccatagcaggtggcagacttagctgccttccctgtggtgtggtgcagaccatgacccttgaggcaaatgggtgagctggccccacctcgcctgcagcctcctctgaggctcccctgctgcctccccactagccgccctgaatcacctacttcccagcacccccagcccgtggttctcatcccgtcttccatctgtgatctggcactcattcttccagagccaaagaggaatcccctcttctcatgcagaagacagtcatgcctgcccttgtgtgtcaaaagcattgcatttatgccctgttagaacccctgtcacaagcatggtgcctgaacacaggtgcctctgtggtctcttctcatcctcacccaatgggtactatgctagccccattttacagatgaggcaaacgtggcacggagagctccactaacttgcctggatgattcatgcatccatccattcacttagcaaatacttatttaacttctgctttgtgctagctagtggggatgtggcagtggggatgtggcagtggggatgtggcatggggatgtggcagtgaggaagacgacagacaggctccttgggaagcagagtaagcaagtgaggagacaggcgggcgtggtgaggctgcgcaggcgctgagatcgagttgctgggggaggcctctctgaggtggtggggcttgagttgattctgaaggacaagaagagccagccctgggggtctgggggaatggtattccaagtggagggaacagcaggtgctgggggcagggaggtgacagatgtgtcccaggtacagagaacagagtgaacaggagagaggagggggccagggcattccaggtggggaaaggcagcaggtggcccggtggtaccacctcttttggcgagggctttggaccttacccggtgtgatgggaagtcctggaagtgtgttaagcaggggagtctttttgatcagattttctagaaaacgacagtgggctgctgtggacctcagagaggcatgtgtgatagtgtgtttcgggctcttcccacgaaactcggctctgcacagtgagacctcatttcctggttctgtttgatgagtgagcgaatgcacatggcaggcggtcatgtcccttgggcctgtgaggtgaggaagggtccctgagccctgtggggatagagactcttccaccattctgacatgatccgagttagcaggcagcactgtccagatggaaatggggatgggagacagaccatctctctcagcgggtccagccatgagccagcagactgtttcccattggcccccatctttcagagtgggatgatctttctaacaaagaaacccacacaggaatttggtgtgtgtgtgcgtgtgtgtattacctttcaggatggaagccggtggggtgtggagcgaggggctggcatggttggcctcgcccagctcctgtaccctgtgtgtgcctagagcatgcacctgctccctctgctgggctgagactcagaggacactgggcaggtggtggggggtaggagggtcgtggctgtgttgggtggggccacatcaggtgtgtggcacagagggggagggggagggggagtggcagtgtgttccacccagcagtccctgtgtttgacctcttcgtacactctctgttgtattagctctcagaatgaaaacgagatacttttccccaatctatgtacgttgttcttaagaatgtacacttggccaggtgcagtggctcacgcctgtaatcccagcactttgggaggccaatgtgggtggatcacctgaggtcaggagttcaagaccagcctggccaacatggcgaaaccccatctctactaaaaatacaaaaatcacctgggtgtggtggtgggcacctgtaatcccagctactagggagactgaggcaggagaattgcttgaacccaggaggtggaggttgcagtgagccgagaccgcgccactgcactccagcctgggcaacaagaacgaaactctgtctcccaaag

SEQ ID NO: 993 - DNA, 1967 bp, Homo Sapiens
tgtcctggctgcgtttctggggcccgtggcccctccttacgtggcagctattgtgtctcctagtggcaattattgtgtctactagtcaaggaggctccacatctggtgttggtcaaggacccgctccagctgacctctaacccctggggtcacctgagccctggtcttcccgctcctcccatctcccatgggaatctcctcatgcacctgctcccccagcagccccaggggactttgattacctggggccctctgcttcctcacaggtgtcagccctgccccaggaatcaaatgaaaatttggttccattcctggatacggattcaggtggagagctgcccctggggccagagcagttcttggctgcacatcaggatttaaatgacaagcggactccacaagaaaggctcccagaggtggttccactgctggacagggatcagaaccagaccctagttcagcttcctcgcctcaaaagtaagtttcaaactgcagatctagatcgggctgcaggtcatcaggcagatgaaatacttgttccgctagacagtaaggtttcaaaaccaaccaaatttgttgtttttccaaagaacttgaagaaagatctagctgagcgttggagccttgctaagattgtcgggattccacaccaattatacaaacctcagcgtcagaaacagactttgcagatgaatatttgagtatggacacactgtattccggcagcctgcctccagaactccgggtgaatgcagatgagcctccagggcctcctgagcaagttggactttctcaattccatctagagcctgaaactcaaaatccagagacccttgaagacatccagtcctcttcactccaggaagaaaccccagcacagcttccactgctccctcaggaggtagaaccttcaacccagcaggaggccccagctctgcctccagagtcctctatggagagtctagctcaaactccactgaatcatgaagtgacagttcaacctccaggttgctcattacaactttcccaacgttacagtcaaacctgcagatgtggaagttaccatgacttcagagcccaaaaatgagacagaatcttcccaagcccagcaggaggccccaattcagcctccagaggaggttgaatcttctacagccctgacgactacagctcctcctccagaacaccctgaggtgttcaccttcagacaagggtcaggctcagctttcacacctgaccgaagccacagttcaacctctggacctggagcttagcataactacagagcctactacagaggttaaaccatctccaaccacggaggaaacctcagctcagcctctagacccggggcttgccataactccagaacctactacagagattggacattccacagccctggagaagactagagctcctcatccagaccaggttcagactctgcatcgaagcctgactgaagtcacaggtccacctacaaagttagaatcttcgcaggattcattggtgcagtctgaaactgcaccagaggaacagaaggcctccacaggcaccaacatatgtgagctctgcacctgcggagatgagactctgtcatgtgttggtctcagcccaaagcagaggctccgccaagtgcctgtgccagagccctacacctacaatggcatcttcaccaccttaaatttccaaggaaactatatttcatacattgatggaaatgtatggaaagcatacagttggaccgagaaactaattctcagtgaaaattatttgactgaattacctaaggattcatttgaaggcctgctatccctccagtatttgcaataaaatacggtatattgaaagacaaacatttgaatcactaccatttttgcagtatacaaatctgggctgcaatttaattacagaactgagccttggaacatttcaggcctggcacggaatgcagtttttacacaact

SEQ ID NO: 994 - DNA, 1712 bp, Homo Sapiens
taattctcctctttgcttttatctcctgacccactgagacaaatcagctcattaagcagtgattcccggagctcagacagcagggagagtgcctggaaagatggggcaagaatgcggagcagcttctcagccccttggagctgacaactttccctcaaatgtcctgtaagaaggcctccttaggagtggaccactagatggcttggaaggggccccaataggttggagcacccctgggtcggaaagaggagttcatgttcaagtcttctcccatcacttactgccaggcccaggatagatgaatgctgatgttcagaataggcaactgtccttttctgggactggtctccttctgggcccaattctccatggggcctctggggctaattacattgccgctagatcagatcattttcaaggctctggtggacacctctttctgacagttgaagggacagctggtatagcccagggtgccaaggtgagcttgaaaacaaacctctctgtggggctggatggccctaggaggttcttcccatccctggtgagaaggcaagggctattgcaaggagcagactgacatgtggatggtgttggagggcagcctgctgacccattgctccctcccatctctctctggctctgatcaccctcccccacttccctttctcttgcctggctccttgctctccctgaggccccctctgaagcagtaggagggagatcaggctctaaataaatccaacggctcatctccctcctctccttcccccgtgccaggcaagagaggagctgcagcctgcccacacactcactaggcaaggggggcaccaccagggcactgtgccaactcctggcagctccaaagtactgaaactctggctattttggcgtagcagggtacaggaaaggtaagaccctagatcatgcttggcagggcagccctggcctccccaagtaatactggagcactagagatgagtgagcctggaggacttgggagtaatggagagggggttccattctgagcacaactcattaaatatttaggaagagatcctgtgattcccatcccagggtgagaggtcaggtaagccagatgcctcaggcgttatgattactaaattaggccgccagcggtgcctcacacctgtaatcccagcactttgggtggccgaggtagatcacttgaggtcaggagttggagaccagcctggccaatatggtgaaaccctgtgtctactaaaaatataaaaattagcccagcatggtggcacatgcctgtagtcccaactactcaggaggctggggcagtagaattgcttgaacccgggaggcagaggttgcagtgagccgacatcgcaccattacattccagcctgggcatcacagtgaaactccatctcaaaaaaaaaaaaaaaattactaaattaaaccaggcatagagactcatgcctataatcccaatgctttgggaggctaaggtaggaagatggcttaagcccaggagtttgagaccagcctaggcaacatagcaagatcctgtctctacaaaaaactagtaggcatggtagcgcatgcctgtagtcgtagctactcaggagacaggaggatcgcttgagcccaggagttcaagcctgcagtgagctacgattgtgccactacactccagcctgggtgacagagcaagacctgtctctaagtaaataaat

SEQ ID NO: 995 - DNA, 1292 bp, Homo Sapiens
ccacactgtgaccttctgttactattacaacagatggttcccagtgagcacaaggtgatatacttcctctgtccacgtgggcccaggtaaccagtccagaccccacaccttgttcccattttaaggatgagcaaactgaggctctgaaaagccccacaccagcatgcagcgtggaccaaaggcacaggaggcaggagccagagcctctcggcaggtggtgcacagtgggaagaattcagagctctccatggcccacctctatgttttgccttgtaaatgatgatgacatcttctctaaagactttccctcttgggagaatatcgtcaatgctgacactgacatgaatttgtctgatggtgagggcggtaggggcacacagccaagttcctggagagcaggggcagcacaggacacatctctctacccacagcgctcaccacagaggctctgccacattcataaggagggagagaagaggggatgggccaatcctttgcccaagatcaagtctttagggctcaggttcattcggaagttagggtaagaggtgaacttcagaccagtactcgattggagactagaaatgagaatagggtttaagattcatattaaggaagggatgatgattcgagctgtacttcagattgatatggattcaagtctagattctggtgagagttctgtttaaggtggactctagggactaggttattgttagccctaaggctcaagctaaaatgcatcttagcattaggtgtgtctgaaaatcctggggcttgcagcaaggttcagtgctgtgggctggggcagaagctctgcaggtgacaggcctgacagccagctggagaggtaggtgtggccaggcagccagggccagataggctctgaggccagcaccgtggacagctccaagggaagcaccttagtaagccaagaagccactgagatgttcccagctgccaacactgaccccgggaagaccaagatggcaccatatcctccagggagttgggggtcttggccagacaatctcctctttcccttcaatattgccagatgccatgtcacaagaagaggtgctacggagcagcgacaggctgaaggaaatcagatactgcccacactcagccccatgtcctgcaggtcatagataggcaggacttccaaagcataccaacccagcccctcagaataggggacaaggtcaccaatgtgaactgaccacctactttgtgccagacctagtcaacattatctcattgcatcataaaaccagcccgagtgtagtagg

SEQ ID NO: 996 - DNA, 2378 bp, Homo Sapiens
caagtacttatttttcttgtccataatctgtgaatcctgctgaaatcagctagactttgctccaggatgagggattggtccaattctgttccatctttccacgcatctttcatcaggttattaggaaagagtacacttcactggctgctctactgggaggctttatctccattaagtgaaccacagagaaaaaagaagagaagagttttacttctgtcatctggtgatacattgctttggtgaatacaagaaaccacaggataagcaacagggctctttggtaaattccacaggctctcctgatagggcagccaagtcttttcccagtagccagccctttgcactaaaacatgtggattttatttctatggatgttgtgagtgtggacctaaacttctctaagagaacttgtatttctcaagcctaaagatgtattacatttttttgtatttgtatttgatccacataaagaaggggaaaaaaatttgtgtgtgtggatagcattccaagaaggaactctagccccaggaaagctgctatttctgctcttctccagctacctgccaacaatttgtcctcaaaagaggctctttctgactatttacagatctgtcacttacagattggcaattttcatgcatttcattctgctttgctttacttcatactggcatcatctttatcagaaggatatataaatatagatatatggatatcgtttgtcttccctttctccacattaacatattccatgagtgcaggaagtgaaatggcatctttatttcattactctctggtccataatacattccctggcacaaagggaacacttaaatacttaactatcaaaataaaaaaataaataaaatcactggatatggaacatgctcattattaaatgtttttctagcactctaccagaaaactatcagccactgttccaccacggtgctttccctctcttgcttcttgcacctcctctgatgttcttcctttttgttagttccagttccacatcacagtcacgcaaatgtaagagaatggagaatgcagtcctttctcagctgggcacaaagtaatgctgagtgaaacagaagttgttattgtggaagaggtaggtgcctgaactgggtgtctcctgataacctttctccccattgctctgtgtcccatattcagagtagactcaccaaagttctcctttgctttctagcttccagtcgattttgaaaaattcagagcatgggcaagacatagcagaaaaagaaattgtgattgattggagtatttattttcctggcttcctccatgtggagttgctaaagaccggctgcatctttcagctgcaatcacagctcctgcctggcagccttctcggtctccaggaccccgtatctgaccagtttccaactcatcttcacttgggagttggctgtgaagagacaggcaagtctcttcatcaagcaggaggaaaacatacagcgggaaggaaatatgaaacgacctcatttctagtttaaccctttggatctcctttgtaccacgtctccttggatgagaagagtctccctctcatcagcacattaaggaatctaccatacaacttcagtcttcagtattgccaaagactagtaacctatgctccaagagttaatgactataagtgcatcactgaagcctgtagaaaaaggccctgatgcctcctgccctaataatttgtatgtgtttatttttttccatttgcaagatagaaaacaaactggtctggttacaactaaccatagatttgcaccaactattagaaatggatttttttatcatcagttttttttcatgttgtgttcatgctcatccctcagatatttatgtttcagtcttgggtaatttatttctatttactttaaatttccttatgaaatagtttcaattatatcacaggttgttataaatagttggtgttaaattatatagaggtattacattgctacttaatgcctgcatttgatgtggttattacaatggtgacgctatagatcaccgtagcaacaaaaacaagaattcatagcctgtttcaaacataagaggctgaaaatatttcatagttattgaaagctgaggtatgaagcaatttaaacatttagctgctgagtaattgggatctagaaatacatcaacctagatactgaatttttagaagagtcaatattgaataatagcacaggtcatttacttttaattgtctagccatctgaatgcttgagcatgtgaacagtaacttcacccatgtagcttatttatctatgtttcataaacaggctaccttctgagagttaattgtgtgaacaggaaaagtcactacctaataaattgatgttcac

SEQ ID NO: 997 - DNA, 1037 bp, Homo Sapiens
ctgtagtccaggttggagtgcagtggcgtgatctcagctcactggaacctccgcctcctcaattctcctgcctcagcctcccgagtagctgggattacaggcgtccaccaccacatcaagctaatttttgtatttttagtagagacggaatttcaccatgttggccagactggtctcgagctcctgacctcaagtgatgtaccctccttggcctcccaaagtgctgggattacaggcatgagccaccgtgctggccagaactttgctttaattgttatttaaaactagcaaacattgctttttcttccaataacatttccttctttctttactctgaaaccctgtgattcaggtttagccagttagacaaccccattcctttggccaaaagtgattagttcaggaatgggaaaccatccaagttggaccaattagagtaaatcctgtggcttctgtaaaaacaactgagaaaatctactcttgttttcctgctcaacttgagtttggagagatgaagacctgggttcctagcaagtcatactgccacctcatggagcctgaaaacaaaatcaaagtgaaagaaagtacagctgagagctggagaaatgccaggttctgttgagatcacttgatgccttgaatctacctgtgtatcccttatcctggaaggtagtcaatacattctgttttgctgaagacaactaaagctgtgtttgtaatcatgtacaactgacaaattccagaatatacattaagcataaatgtgacgtccaagatatatccatctaggcctactttataaagaatattttaaaatttaggaatgatattaaattttatcaaatgtttcttttggcttctttagagattactgtttatttttattttcccccattaatataaaagttgtgctatagacttcccaatattttgttcttgaagttttgttcactgctgtttccctagtattatacatatatagtagcatatatagtaggccctcaataaaatattcagtgaatgaattaactgctgta

SEQ ID NO: 998 - DNA, 1132 bp, Homo Sapiens
cgacagatatgcagctacacaatgtttttactatcttgagttctttttacccagattccatagctaaatccagatgtattaataggtagagactacttcagaaaggatgagactattttcttgcttaattatccacacagtaattcagaaatgtatattgaacactttttatatgccaggcactgctgggcactggaaatataaaagtaagcaaaaatgaaaaactatcctgtcctcctgaggcttagcatctaagggagacaggcattagtcaaccccgtgtggctgtgaatcagccatgatgctgagtgctacaagagaggactgtgcggctgggagggcttataacaggatttgacctagttagggaagatctgaggaagtgatgaaagaatggaaatcaatatgtaagagctcacaagtcagagtgagatgtttcttcctatactgcctgcttctaatgagcatccacttcattgaaccacctcttcattgagccaaacctaccatacagggatacattctctggaggaaagttgagcaactattgcatttgggacattagagtatgggtgggctgacaggtatgtgtatgtttattatccaagacagccaaggtgtttatcctgttacaacatcccagaggacagaggctcttatttgtgactcttttttcttacctgtaacaccagaggcataacgtacatcataatgctgcatcttgttgacgcttcaatgctcacaattcaaaggtgatttctgaagcactttgttacactggggacagctcctaaatcctcccactctttttttgcctcaccttggagtcttgggctctgttgatcactgactctgccaggtctttcagcaggcaagacagctcagttaaattgagtttggactccactgtagtgcatgcatgagacagcacccccaatccccaacacccacacacaaactttaaatatttgtaacagaattgttaccattaatattgcttaaaggctaacacattagccagaacctagatgtcttctggaaattttttattgcaatgttacttcatctacataaagttgtccaatcactgaaacctccaactgaaataaatggtaagctttttgttctcaat

SEQ ID NO: 999 - DNA, 2820 bp, Homo Sapiens
agtactgcagtgtgcggcgcatggctgcgagggcctgccgaggggcgggcgcgagtcggaaagacaccgaccagggaatgggcgacgaggcttgccttaattcggaggaaacccaggacttgagagagccatacaatttgaaagacgaagcaccgtgaaatgcagaaagttgtggttcggatagctcagctgattaatttcatgttgccacagtttgtcagtgagttttgcctttttattttctcagttcctttaaaggcagtgcattcggtacttacctgataatgtgaaaaacgcgagctttagaaaaccgaataggtgtacatggtttactgtaatgacttgttctccaaagtaagagtaccaaacgctggaagcaaatagtatttcagtcattcgaagagtagtgcccaagcatttaacattgaagctgttaaaagggcaaagtaggccccaattttagatctaagccatcaactttatggaacagtcctaagggctttttgaaaaggagatttaaaaacacatttcagaggtggtagctgagttgaagaagtgaggaaagacttggatagggaggaaatagtttgacactgaaggatgttaggaagtagggattccttgtgcaacttaagagttttgtaaataagacggcttggccttgtgtcaagatacatcaattggttatagcttagtgcttggaggcccacattataggagtagactagttctccctccgccccgcccctggaaaatctatttcaagaccataaaccacattgctaatccttggaaatgcagaaggtggttaggtttaaaatgtggctttaaaatggtcctaacagaaacgtattgatgttactattcagaatatctgcccagtatacgaggaagaaaaaggttaaacctaaaacactaaaaattcatagttcatattcagttattagcctatgaagatttggtacagccttcatccttcattttagacaaataacaaatctatatggtttataagtgtattttgtaaggagttatatatatctatatatgtgtgtctccacccatctgaacctgacctgcaaaccaagaggttcttgtttatttccgatagttttggtagtcttgttaaaggcatttgattcaaaatccaaatttgcatacatttttccaactggatagaggaggcaggaatatatttgaatattgttctcacttattttgtccctcttcttattctttaaaaaaaaattaagcctgtcaattttagcagtgggggttgcatatcaattttagtgatactaatgttaataagttctgataacccactaccattggaccacccccactcttattcctaaaacgaatctgaaaataattagcttgctttaacgggaagaatgaatgttagggaaccaccctgctgaactccattttgctgtcggctctgaataaagctattttatccagaaaagctatctctggacaaatattttgaatagttcagtaaccgcaataggtttctgctagaaccattttgaagccaccctttaaccctaaccaccttatgtatttccaaggattggcgatgtagtttatggttttgggatagatttttctgggggaggggagaacctcccttctagctctctgcagattatcagagccgccactgcagggatttgctcccgtgggcctatatgtctccccagataccttcctaaaactattagcttttatctgtctgtgtattcccctgttgtgaatggggaagtatttgagggcttgtttttttaggttcttgataataaatacctcaggtttcacagagtaatcaaactaaaagaaaacttcttttttatttcattttatttttttgaccgaaactccatctccaaaaaaaaaaaagggtatattgttatgtgatattgggacatccgaacattttgttgtcataggagtttgtccttgccagcattaataaactgcttccttagctgtaaacatcttatgaccatgggttgtatctggtaaggaataggctttgctagtctaaatttagaattgattttgaaattgtgttatcctagcccttttttctttttttgagacacagttttgtttttgtcacccaggcaggggtgcaatggcgtgatcttggcgcactgcaacctctgcctcgtgggttcaagcgattctcctgtctcagcctcccaagtagcagagattacaggcacctgccacaatgcccagattatttttgtatttttagtagagaagggatttcacaatgttggccagactagtctcgaacttctgacctcaggtgatccgcccacctcggcctcccaaagtgctggaattacaggcgtgagccaccgtacgtggccatgttaccctaactcttatgttcctgtttccctaacataatacctcctttactcttctcctctactactctaatcttaaggggagatgaagggtgaaggtcattttttgtaacttcttcctgctgacagtggacgttgatctttgggacaggattctcttataagaatttgcagttggtgggctgggcacggtggctcatgcctgtaatcccagcactctgggaggctgaggcaggcggatcacgaagtcaggagatcgagaccatcctggctaacacggtgaaaccccatctctactaaaaatacaaaaaattagccaggtgtggtggtgggcacctgtagtcccagctactcgggaggccgaggcaggagaatggtgtgaacctgggaggcggagcttgcagtgaggcgagatcatgccactgcactccag

SEQ ID NO: 1000 - DNA, 1181 bp, Homo Sapiens
ggcgtggtggtgcgctcctgtagtcccagctacttgggaggctgaggcaggaaaatcgcttgaacccaggaggcggaggttgcagtgagccgagatcgcaccactgcactccaggctgggcaacagagcgagattccgtctcaaaaaaaaaaaaaaaaaagaaaaagaaaatatagagatggcaaatggcacataacaagatggtcaatatcaattcctagtcactagaaaataggcattaaaagtgcaagataccaccataaacctatcggagaggcaagatgtcaatgccggactatgctgagtgctggagatgatgtggaggaatgggagcgttcatatgcactggtgaaaacgtcaaatggtaccaccttgtaaaactactggatagtttccaaaaaagttaaatatactcctgccatgccatccaaccattccgccatttatccacaagaaaggaacgacatgcccatataaagacttatacgcaaacacttacaggtgctttatttgtcatggacaaaaactggaaacacccaaatgtccatcaaataggtgaataaacaaattgaggtatatcaaacaatggaatacgtctcagcaataaaaggaatgaaaggaataaaaggaataaactactgatacgcacagcttgcagtgagccgagatcacgccactgcactccagcctgggagacagggtgagattccatctcaaaaaaaaaaaaaatgttaatagctccccagatcgatttatagatttaataaaatcataagcaaaatcccagcaggtttctgttgttgctggtctgttactgaaatcgacaaactgattcttaaatgtatgcggaaatgcaaaaaccaataaaatcttgaacagcaaacctggaggcctcacgttaccgaatattgaattattttaaatctagtgtggcactggcattaggacaaatagaccgatgaggaaatacattgtgctaggaccattggatctctatatggaaaaaattttaaccatctccctcataccatgcacgaaatagattctagatgattctacatctagccatgacaggcaaaccattcctagaaaataacataaaagattcatgacctggccgggcgtggtggctcacgcctgtaatcccagcactttgggaggccaaggcaggcagatcacct

SEQ ID NO: 1001 - DNA, 2648 bp, Homo Sapiens
gcttcaaatgtcagacataactaatctctttttcccttcttcccttttctagcaaacttccagaaacaaaacagacaaaactttgtgatgataaatatcacagttgccacacaggccagcagaaacccaatcacatccaaagagtggtactggaaccaggcatatgagtacatgctcagcatcatgagccattttaagtgctgtaagaaagactatgaaaatgcgatgtgagaattatcatctgtaagttcctaaaaaggaattttatcaaggcacctatgatgttgagacaagttcatccagaaagctttactgatttgcttgtcataaggcagacatcatctgctctaatagttttagttaaagatgtaggataaacttcaaatttaagagtggatgcatcattgggatcaaaaagaatggaagctgaagatgccagtacagtcacctcatgacctctctgaacaagctctttcaggattgtcttcatattcatccaatggctgtattctgcggcccacaccagcacttttccacaactcccagagctaaagtaacaactgagatgtatcagcagaagaactgaagtccatttcagagtcatcctggtgcaatgcgatcattcttttccagtcactgtttctttctcatacttatatacagagataaatcaatcaagttaaaatataactcctccaatccaaagtaaatatattataggagcatcctgagtacatggatggcaaggagacaaacaaagttcgattacttcatatttactcaaggatgttttatgtttcttttatgtttatattcactgtcatccacctaagattaatgaccttgcaagtaccctgttttatgtaacctactttataatagtgtcaagaacagtggcaagtgagagagtcctgcagagcccttgacacagaataagagatgaaatgattgtacaatgcaaacagcatttttgaatatcgtggttcaatgaatatcttgtaaatctttgttggagtataattcaaataccatatgattcatcaattagtatttaaaattaagtatttcctagtaaattcacagacttgtgcatccaacgtaacaatcagttttatctaaaaaaacaaaaaactcctgtgtattagttctcatctccccaccaaatttctgcatccaccctgcactaggcaaccagtaatctaatttctgcctctagaaacacacctattcaggatctttttaaaagtaaacggaacaatatagtatgtggtcttttgtggctggcttcttttatttagtttaatgtttttaaaggaccatccgtagaatagtgtaaataaggacttcatttttattgccaaattgtatcagatgctatttataaacacaatttatttattcatttataagttgatagatattgattttcttccacttttggccattatgaatagcattgattaacattgatgtgcatgaattctgtggacatgtttttatttttcttggggatatgcctagaaaggcaattactgaattatgtggtaaatgtaaatataaccttttgaggaattgctagactttttcagagtgagtgaataattttctattctcaccaacaatgtatgagggtttcaatgtctccacaaccttgcccacccttgtctttcacataaccaaaaaagttattttttattttaatttataaacacactccaacagacccaaaaaaggaaggtttccttccacatattggagggaaaagtgaataaattaaataataacttacctaatacttcactgtaaaactaatctcacttctttttgttaaaaatctcaaatgcaaagtcaaaatgaagaaaatgcaacagatttttcacctttctacaaatgtgttttggtactaagttctgatatgacaacagttacatcagaaggaggtaatgtaagtcctccacagagttcttggtacatactgccagttgtaaatggatgatagtagaccaaatgtataacaaatgtttaacagactaagctgttcagataacagctcactactgagaactgacatctgcaagaatgacataaattctggaatcttgttgttcctcataattttcttgttcaaaacagcatactcaatgagcttttgaacagtatcagaacattcatgatatgtagtttttgcatctttgaatcatatgccaacaatgtactctttggaaacttatatgtccacatcttgatcaatttcataaatatgaaatcaagttccttctgagtaaaagatgtgggataaacctcaaatttaacagcagattgttggaatcaatgaggatggaagctgaaggtgacaagcacagttacctcatggtgttctgagcaagttcatcaagtatcaacattaaattgatacaaagactgtatttcatcggccacaccagcacattctcgcaggattcagggctaaaatacaactgtcagcataagaaacaaaaaagcccatttcttagacaacttgttaaaatgctatctttctttataactttctctaacttggtacatatcaatatcaatcaatgtcacaatgatttaagtattgacaatagaggttttggaaagcaagtgaataaagaaaaggatgaatg

SEQ ID NO: 1002 - DNA, 7017 bp, Homo Sapiens
agaaagagtgctttcgccgtgggtgcagagggtgggcccgccgggttgggtggggggcgtgtgatgacggtaatggcgacgagatgctcaactcacgcggcctcttttaatcctcacagcagctctgcgtggagaaactacagtaacgtgttaccacgttaaggcgggaagctgaggcatgggagtatttagtaacgttcccgggccgtagagctgcggtgtgcggccgcctgatccacctgatctgtatgactcccgtactcaaccagcctatgtttcctaccagcgaatttttttttttttttttttttttttctttttttgagacaatctggctctgtggctcaggctggaatgcagtggtgcgatctcggctcactgcagcctcgacctcccaggctcgggtgatcctcacttctcagcctcccgagcagctggaaccacagtcgcctgccaccaccaggctcggctaatttttgtattttttgtagagacggggtctcgccatgttgcccaggctggtctggaactcctggactcaggcgatcctcctgcctcggcctgccaaagtgctgggattacaggcgtgagccaccacgccgggcctttccccgggaatgctgtggtagagggacccgcagaggccccgaggctgcctgcatgtgtgtgttgggaggatctgcgctgagggtaggtaggagttgggcaggccaggacaggaaggaggcagagggcatgtcccatgcccgtgcagagggaggacacgcatggtagaccaggacgaggacaagggcaggctcagtgtgtgcaaaggggacagtggtttgggatttgcatgcagatgcccgagcctccaaaggacctgtgggccacagggagaccctgggggagttcaagctgaggagtggagagggctttgggctggtcagcaggtgctcagaggagaggggctggccctagagagaagggaggtcttgggatggtggcccacacctgaccctggcccttcatcaggtgattcctgcgtggatgcctgcggggattcctgcgtggattggggaagtcctgcagcattacagaattgttacccaacgccagggccttggtccagagtcctgttgctagatgcacagaaagcaaatcactgagatgtaagtattgccagggaagaaggctttattcaggtgacatcagccagagagacaggagacgaaactcaggtccacccctgtccctcttcccgactaaagttgtaggttgatatagtctaaaaagaaagcaggagccaaggaagaggaggtggcccgcaggccgcaggagcagcctctcattgtccaaatgtaggtttctcaagcatccggcttgttaggaaattgggccagtttcagaatcatcagcttgttcaaaagtgggacttgggaggtgagaagggttgtcaggcaggaaaccctgcattctgctttggctgagtggatggggcccaggaggatgagcagcatggggaagagtatgactcgtagtgggcaccatgaggataaagagttacaagctcctctggcatgggctggagggaagggagaccctatcgcataaccacagccccacctgcctggagagaagagggaggcggccccgctccgtgccaccccactgagaaagataggacacctggagctccagctcagcaatccctcaatccctcaatccttcatttcatccttgcaacagtcccaggaggttttttttttttttttttttaaggcagagcctccttctgtcacccaggccggagttcagtgacgcaatctcagctcacggcaacctccacctcccgggttcaagcgattctcctgccttagcctcctgagtagctgggattacaggcatgcgccaccacgccaggctaatttttgtatttttagtagagacggggtttcgccatgttagccaggctgatcttgaactcctgatttcaggtgatccgcctgcctcggcctcccaaagtgctgggattacaggtgtgagccgcctcacccagccaggaggtatcaatggttaattctctccactgaacaaatggaaaaactgagactcagagagggcaggaatggccttggatgcagtgattccatggtgtggcctgagtcagatgccagggcccctcggacgcccgctccacaggagaggggtgactcagaggtgccgtgtctgtcctcttctcctgaatatgggtggttggtgcgggggcagggggtgagtcactgcactgtttcccatgcctcccacctcggctctcatggttgggagcggctgagggaggaggctgaggcagggagagggaagacccaggagggaggaggcaggcgctgctttgaggggtgccctggagccttggcaatccttttcctcctcgggcccgggagcccaggccccgtctccaccagccgcaggcgacagctgtcatggtggtctacagcctgggcctggggaagggctcagagcagtgtgcagctgcagccttgggcctccatggccaccagcagcatcctcaggcggcgcggcgattgcggcgggtagcggagggcgttgagcttctccatccccgggctgcgcaggaggcaggcgcgatggtgggagaaggtgtcgaaggagaacttgccatggtaccggcccatcccactggcacctgtacagtggcacagaacacaggtggtcaggcgctgggggtctcctagtcacagacagtggggcctaggcgggctacttctcccctctgagcctcagtttccccatctgtccagtgggctgatcatgaggcactgtgtgtaaagggcttggccccgagcttggcaccagctcagtaagccctggggatgccagatgccagggcaagataggcgggtggtggtcaagggcatggattccagagtcagactgccgggggttaaactctggccctgctgcaaacaatccatgtcaccttggactgtgcctcagtctcctctgtcgtggggtgacaagggtacctccctcctaaggttgtggtggggattgaggggatgttgagacccctggacccagtaggtgctatgtgcagtgaactctcctcagcgtctaggttgggaggcagacgaggccccaggccagggcgttcagagcacagcctgggtggagtggggttggctggggggcttcctgcagtgagtgagctccaaggatatgcagttaataagacgaagagagtgggtgggggcaagagggacccaggcttggggagccttagaggtgggtgccatgcggtgtgttagggacctgggcagagctcaggctgtgggagcagcaggtggggaagccggggtggggccacggccaccaagaagggtcagctcgggggcctgggagctgggggaggctttcttgagggagcagcagggtcagatgtgcccacagacagccccgactctcctccagggcagggaggcgggttgaggaggctggggctggggctggggaggcagctaggtggggtcgggggcagccgcccaaactcgagccgagccaggacagcagcacaggcactgttgtgcccctggctgccctccaggaagggcatggacccacctgaggcagcttgcctggccctgccatcgttcactgtggtgctgagtgtggacaggtggcgggactgcctgtcacctgctcggggcctactgttctctgaggaggaagtgggctcagaaaggggagatgtcacctgggccacagggccttcagcgtgttgctaggaccatctctgaggcttcctgactcagaggccaggactctgcagtggcatcggggctgctctggggggtggaggattggcactcatccgggcctctcagggtggggaggtgttgtactgagagctggaggggggatggggttagaggagcagctgccctggagtaaaggacaccggcggcattgctgctgaggggcagacaccaggtcatgctgttggggagaagagcaaatagcatcgcagtgggcagtgtgatcatagttgtgtggtatttttaaaaattcactaaattgtgtgtctgtgcagagatggtctagaaggttccaccacagacttttttttgagatggggtcttactgtgttgcccagattggactcagaccctctggggtggggagcaggatgcgggttctggggtgaggcctccttgcctgtccctctacattgaggtggggctggggtgctttggcagaaatgtatgcaggtaacactattgcaatttgaccaaatggtaacagaagggcagggtagcaggcacctacccactcctccaaaaggcaggctggccagggtcatgtgcatgaagccgtcgttcccacagaagcccccgctgctggtctgggtcagcacccgcttgaccacctgggagagaacaggatgtgcgtgaggctgccttgagccccatcaggatcctcaggacccagagcctgttccatgctggactctgtgacactgatcttgcctcagaaagggtctgaggccaccatgtcagctgaagggcctgtgatggtacaggtggggcagggggttgtgtagcagctcctcatgaagcttccaacttgggacatgtttcctggacatctgctcatgtgtggtccatgctgatggcacagactcttagggctgggggtaggggcaggaaacctagtgttgcttggggacatggagggtgtagtggcagcagggcagtactggacagtagggaggcatcccaggagaggggtgtcatgtgcctgctgagtggagggactgggagggacagaagttgttcaggcaaagagggcactgcagacagagtggaggctgaagagctgtgtggtgtgaacacagggacatgaaaacataatgatgtggtcagatttgcactttagaaacagaagcttggcccttgcttgaaggtccttgagaaggaccttcttcctcaatctgtagacttatttgaagactgaaaggaaaaaaagattggtagacactaaatagttgctgcacaaaaacttcagtatatttagttgcaatcaccgtgaacctctgatcacagctgggtcagggcttgtctgatgtggggaaagcggactgcccccagtggattcagacgtcacttcatggcatgagaccagcattacccacaatggcagtggcagcagatggaggagatggagcagaaggcagcagagggcgtcccaggtagtacgggcaagccaccttgtgcatgacttgtgtcttaggtgtgactgtgtgtcctgggatcagttctgggtggtcagaaaagtttgaagccagatgactccactgtcaaaaaacctctgtagagttttctaaaggtgaaagtatccagatgaagcagggctccttgaaggaatggctgcttctggagttggagcaggggagatacaagatgagcctggagctgcttgtagcaccagaggggaaggaggtggtcacaacccaagaggctgggacatcttacatgggcttctgagcccgagcctcagacaaaccacacgaccttggattacagcccctggagtcaaataaatatacctgagtccgtagtgacctaaataaacaattcaagagatgaatctttcttacagaattccaggaaatagatgtagatactgctgttagccaagaatacggtatccagctaagactatgcttcgtagatgaagaaataaagcctttcccagacaagcaaaggctgggggaatttatcactactagatcagtcctgcaagaaatgctcaaaggagtcttaacataaaaacaagttggtatttgccataatacacacaaaagtacaaaactcacaggccctataaaacaatcatacaaaggaggaagagaaaggtatcaaatggcaatacaacaaaattccaccaaaccacaaatggaataagaaaagaatgtataaaataactagataataactaacaatatgatagagcagcatacagcttaattacctccacctggtgagggtggggtaggcttagagacttgcttccaaataataaagaaacaaacaatagtagcttcccagggaaaccctggcagataccgtcctgacccggtagtgaaggttccactcactagccacgtgtgcatctcaggtgccccagatgtggtgtgagaggcaggctcacctctgtgggattctctcctaaaaccagtaacctttctttaatcatgagaaatacaccagatgacctgaggctggggatgttctacaggagacctgtccagcactccttaagctgagagggttattaatgcaaggtgggaccctggcttggatcctggggccgaaagaggatgtcagtggaaaaacagcaaaatccaaataaagtctagagtgtagttaatagtaaagcactgctgtcactttttttttttttttatgggtcaggagatccttccacctcagcctcccgagcagctggcattacaggtgtgcgccactatgcgcaactaatcttaaaaaaatgtttcatagagacggggttttgctatattgccagcgctggtctcaaactcatgagctcaagcaatcctcccaccttggcctcccaaagtgctgagattacaggtgtgagccaccgcgcccagccctgccatcacttttttagttttgacccatctaagcaccattaaatgggggaaattaggtgtggggtacatgggaactctctgtaccattttggcaacttttctgtaaatctaaaagtatttcccaatacaaagtttatttaaaaaaagttcaagtggccgggcacggtggctcatccctgtaatcccagcactttgggaggccgaggcaggtggatcacctgaggtcagcagttcaagactagcctgaccaatgtggcaaaaccccatctctactaaaaatacaaagaattagccgggcatagtggcacacgcctgtaatcccagctacacaggaggttgag

SEQ ID NO: 1003 - DNA, 10522 bp, Homo Sapiens
gttatctgccgacagcgtaatgcgaggcaagtgccagccgttccgcccggcatacaagcttatggagcagccccctttgaagatctccaggtagacttcacagagatgccaaagtgtggagatctgattcctagattgggactgcccttacggatcagctcagataacgggcctgcgtttgtggctgacagtacagaagatggcaaaggtatcggggatcacatggaaaccgcatgccgcctcctggtctcagagttccggaaaggtggggcggataaatcggactatccaaaatggtattactgtcttccccgctggatattaaaaacaattccacaaggggcgtcaaaccacctgccaaatttgagggaatgttatcctctcccccgccccccgtccccagatattagagacaataacacaggggtaatgtatacccactgctttattgggagtaatatcatcctctcccttcttggatattaggaacaatatcacagtgtgcgtgtacgcctgtcgcgaaattcaatgtaatgtcatcctgtgcctctgtggatatgacgaacaatatcacgggggatgtaccacttctgagatattgggagtgatatcatcctctcccctctggaagttagggacaatatcacaggggtagtgtacactctctgtgatgttgggactaatatcatcctcccgccccctggatattgaaaaccatatcacaaggggcgtgtacacacacttcgatattggtattaataccatcctctccctctttggattttcagtgcaatatttcaggtggggtatacaccacctgcaatattggaagtaatattattttctcccactgtggatatcagcaacaatatcacagggggtgtgaaaaacccctgcgacattcagagtaacatcatcgttcccctcatgaatattaagaacaatatcgtggtggggggtgtacaccccctttgatatttgacatcatcctcttcccccctggatatgaggaacaatatcaggaagggatgtacagaccctgagacatttgctgtcatataattgtctctcccctagatattaggaaaaatgtaactggggatgtgaacacccctgcgatattgggagaagtatcatcctctcccccgttggatattaggaacaatatcacaggggaggtgtactgcctctgggctattgggagcaaaattatcctctcttcccctggatattaggaagggtctcagagggggagggtgtacattccctgcgatattcaatgtaatcttatcctctccctcccagggtattaagaacaatattacaggaggggtgtacaccctctgcgatactaagagtcatatcatcctctttggctctggatattaggagcaatatcacagggctgtgtacaccccctgcgatattgggagtaatatcatcctctccacccaggaaattactaactaggtcacggggggtgtactccccctgcgatattgggagtaatgtcgtcctccctaaacctggatgttagcaacaagatcacagagggggtgtacacaccctgcgatattggaagtaatatgatcctcttcccccccaccccagatattgggaaaaatatcacagcacgggtatacatttcctacgctgttgggagtaatatcattcttttcttctctggatattaggaacaatatcgcaggggtggtgtacatttcctttgatattgggagtaatatcatcctctctccattgggatattaggaacaatatcccaggggggtgtctaccctctgcgacattgggagtaatatcatcctctgtttccctggatattagactcaatgtcacaaaaaggtgtacaccccctgtgatattgggaataatatcatactctccttccctggatattagaaaacaatgtcatcaggggtgaacacccgtgcgataatgggagtaatattttctctttcacaggccattaggaacaatatcacagagggtgtttacacaccctgcgatattggaggtaatatcatcctctgccccccggaatattaccaacaatatcaaacagaggttgtgtacacttcctgtgatattgggagtaatatcattctctccacccccggatattaagaacaacatcccggcggggggtggtacaccccccagtgatattgggaataatgtcatcctgtccttccctggatattaggaaccatatcacaggggggtgtacaccttctgtgatattggaagcaatatcatcctctcccccactggatattagaaaaaataccacacatggtgtacacccactgtgatattaggaagaatattacagggtgtacacccactctgactttaggagaaacagctacctaaaatgtcacaaacaatatcacagggtatacagtaatatctccctaggatattacaaatactattacagggtgtacacccactgcgataacaagagaaatacatcccaaggacattaccaataatatcacaggctgtacacccactatgacataaggagtgatatttccctaggatattacgaataacatcacagaatgtacacccatggtgtgcacccatggtgatattaggagtaatatctacccaggacataaccaataacagcacagggtgtacatacatgatgtacacccatggtgatgttatgagaactatctccctaggatattacaaataacatcacagagggtacacacatggtatactcccactgtggcactaggactaataactttctaacatatgaatagcatcacaaaatagaaacacatggtgtacacccactgtgatattaagggtaatatccccctaggatattatgaataacatcacagggtgttcacccatggtgtacacatgctgtaatactaggaataatatctctctaggatattatgaataatatcacagggtgaacacccactgtgatattgggaacaatatctctctgggatattacggattatatcacagagtgtacacacatggtgtacacccactttggtattaggagtaatatcttcctaggacattacaaataatatcacagagtgtacacccactgtaacattaggaatcgcatctccctagggtattacaaataatatcacagggtgtacacccactgtgatattaaaagtcatacctcagtcagatattgtgaataatatcacggatgtacaccacgtgtgcacacccactgtgatttttaaagtaatacctccttaggatattatgaataatatcaaggagtgtacacaccccatgacattaagataacatccctttaggatattccaaataataacccaggctgtataccccatgtgacattaagagtaacatcttcctaggatattacgaataagatcccagggttgacaccccctgtgattttaaaagttaaatccccttagaatattactaataataacacagggtgtacacccctgtgatgttaggagtaacatcctcccaggatattatgaataatatcagaaggtgtacacacatggtgacattagtagtcatatcccgctagtatattgtgaataatatcacagggtatacacacctgtgacattaggagtaacatccccctggaatattctgaataatatcactgggcgtacacctcctgtgactttaggagtatcatcctgctaaaatattacgaataatgtcacagggggttagcctgtgtaatatcacagggtgtacaccccctgtgacattaggagtaacatctttctagaacatcacgagtaatatcacaatgtgtacaccccctgtgacattaaaagcaaaatccccctaagatattccgaataatatcacagggagtacaccccgtgtgacataggagtaataatccgtgaggatataatgaataatatcagagggtatatacgtattgtgacattagtagtaacatcctgctaggatattacgaataatatcacaaggtgtacaccccgggtgacattaattgatggaacagtcccctagaatatgaccaataacattacaaggtgtagaacacctgtgatttatgagtaagagttctatagaatattacaagtaatatcattcagtgtgcaccccgtgtgacattaggagtaacagcccacgaaactgtgacaaataatttcaaaaggtgtacaccctctgtgacattaaaagtaatatcttactaggatattacgaataatatcacagggtatacagcccctgtgacatgaggagtaatgtctttttaggatatcgcgaataatataacaagatgtacacaccctgtgacattaggtgtaacatccgtctaggagactatgaatactatcgcagcgaacacaccccctgtgacaataggagtaacatccccgtaggatattatgaataatatcacaaggtgtacacacattgtgacttcagtgctaatatccctctcatatactgtgactatcacagggtgtgcacccctgtgatatgacattaggagtaacatctccctagagtattatgaatactatcatgagggtacacacgcctttggtttaggagtaatattcccctaggatattacaaatgatatcacagtatgtacactcactgtgatattaggagtcccattttcctaggatattatgaataatatcacagtaggtgttcacacataatgtgtacaccatgtgtgtacacccatgtgatatttgaagtagtatgtccctaggatcttatgaataatctcaaaaggtgtacaccccatgtgacattaaaagtaacgtcccttttggatattccgaatgctatcacagggtgtgatattaggagtgtgatattgggagtaacctcttcctaggataacccatgtgatattaggagtaacctcttcctaggatattacgaataacatcacagggtgtacacccctgtgactttaaaagtaacccccccatagaagattatgaataatataacagggcgcactccccctgtgacattaggagtaacatctccctaggatattatgaataatgtcactgggggcacaccctctgtgatattagcagcagcatctacctaggagattacgaatgatatcacagggtgtccactcactgggatattagaaggaatatctccctaggatataagctatcacatcacagagtgtacacacatggtgtacacccactgtgttattagaagcaatatctccctacgatattatgaaaaatatcacggggtgtaccctctgtgggatactagaagtaatgtttaccatggatattacaaataatatcacagggtgtacacacatggggtacacccactgggatattaggagttatatctctctaagatattacaaataatatctctctataagattacaaataatatctaagggtgtacaccccctgtgacattaggagtaacatccccctacaatattgggaacaatatcacacggtgtacacccctgtaacattaggggtaacatccccccagaatattactaataatatcacaagatgtattgtgacattagtagtaatatcctgctagcatattttcaataatatcacagaaggaacacacctgtgacaataagaataacatccccctagaatagtaagaataatagcacagggtgtacaccccctgtgacattaggagtatcatctcactagaatattatgaataatgtcacagagtgttatcttctgtgacattaggagtacagacccctgggaaattatgaatactatcacagggtttacacccctgtgacattaggagcaacatctttctagaatatcatgaataatgtcacaatgtgtacaacctggtgtcattaaaagtaaaattgccctaggatattatgaaatagaacacagggagaacacctcgtgtgacattagaagtaacatcccctgaggatataacgaatatgaggcatttgtcccggtgggacgccccccagagcagtgtgtggcaggcccccgtggaggatcaatgcagtggctgaacacctggaaggaacaggcacttggagtctgcacatctgaaacttggtaagactggtctttgaaacttgctcactccgtttgagtggaagcgtggcctgatcacccacggcgtgcctgtacaggcactttggttttggttttgacttggtttgaattgcttgacgggactggtcttgagaacttgcccactccatttgagtggaagcatggcctgatcacccacagcgtgcctgtaccggcactttggtttttgtttttgatttgacttggattgcttgatactttggttttggttttgacctggcttagatttctggttactctgattttggttttgatttttgtttggtgcaaactgcaaaactgtgtgtgtgccctttttacccatttttttgttttgtggtgtgcgtgtggagtgagcatggtattttgtctcaaagaagcataggtcaggcacaaataagcccaccctactaggaactatgttggaaaatttcaaaaaaagaatttaagagagactatggagtactgtgacactaggaaaacttaaaactttgtgtaagatagaccggccagcattagaggtagattggccattagaaggaagcctggacaggtcccttgtttcaaaggtatggcacaaagtaacctgtaagccagggcacccagaccagttcccgtacatagacacttggttacagctggttttagaccccacgcccccaacacacagcggttgagagaacagcagcataagcagatggcagaggcaaggaaagagcagcagagagagagagaggaaagagacagagaggaagagaggaaaagagagagaggaagagacagagaggaacagacaaagagggagtcaaggagagagagagaaagagagaggcagagagaggaagagacagaggcaaaaggaaagtcagaaagagagagacaaagtcaaagagagaaagaaagaaagagatatacaagtagttaaaaaaaagtgtaccctattctttaaaagccaaggtaaatttaaaacctataattgataattgaaggtattctccgtaaccctataacagtccgataccactttgttgtcagtgtaaacaagggcatatcccgaaagcactgaggccttcctatcaaaaatccttaaccccataacccgcggatggcccaaatgcattcaatctgtagcggcaactgcttcgctaacaaaaaaaaaaaaaaaaggggaaaaagaataacttttagaggaaacctcattgtgagcacatctcaccagttcagaagtatcctaagggaaaaaaaaaaaaaaaggaaaaaaaagggggcgggtggaatttatataaaaagagtattatatggtaaattcttgtcctgaaataaattaactggttgtttaaagaaagaaatatttgtaataagtcagaaagttgaggcatgtggaagaattgtctgcaaaagtcaagaaagagaaaaatgttataaaaaagaatttatgcaaaaaatgttgtataatttaaaagtaactaggcctcctgaatgtaaaactattgaaaaaaaaaaaaaacaacagtttatgtgcaaggtgtataagaaaagtaaaatatatctttggtaaaaggattataaggaggcataagaatgtacatttttacctacattaaaaagttaaaaatttattgttttgaaggtttaagcaaattttaaaacattaattgtaaaggaaattctgtgtataaacatatttgctaaagttaaagaagtatcatccagtttttctgtgaactagacattaaagtaaaagcataacaggtttttcttaaagcaccaacctgctctttagcaaaaattatgaaaggttaaaaagagtctataaaatcgtaacttacggtcaaacattaaaaattagataaatatgtctacaggcttttattaaaattaggtttaacattaataacacactaatataaacataacatttagcttatctggtataaaaatcatacaagaagcattgttaaatgtaaaatggtatttggctttctttggtttaaaaactaataaaaataggtgctaaaggaaatttctcagtaaaaagacactaaggactataaagtccactgccaaggtccccacatttaaaacaaaaggtcagtttcttaaaaattatatacttggtttatcttccactttcctttctctcaaaaactaaaagtcttttagcacatgtaccaccgctagaatttccagtaaatcagcaccagcctgaagatcacgttctcatcaaagggtggaaagaagaaaaacttgagcccgcctgggaaggaccctaccttgtcctgctaaccaccaagactgctgtttttacagaaaaaaaaaaagatggactcatcacacccaagtcaagaaagcgccaccccctccagaggtgggggccatagtcccaggggaaaaccctaccaaactaaagctaagaaaaatggaggaaacttcgtgttccttggagacctgaaaggatgcagtgaagcataagaattttcaagagcttatcaatgaggcagcccttgttcatccctgagcggatgtgtggtggtattgtggtggacctttactgggcactctgccgaataactggagtggcacttgtactttagtccggttggctatccctttcaccctggcatttcatcaataagacatcataaagcgagagaagctccttaggggtctttcaactctcatgtctatttagacgcaattggagtcccacgaggaataccagatcaatttaaagcttgaaatcaaatagctgcaggatttgagtcaatattttggtaggtgacagttaataaaaatgtagattggataaactacatctattacaaccaacagcaacgagcttttcatgagttaaaagaaaactcacgtcagctccagccctgaggctacctgacctgacaaaactcaacattctatgtgtcagaaagagaaaaaatggcagttggagttttaacccagactgtggggccctggtcaaggctagtggtctatttctcaaaacaactagacagggtttccaaaggctggccccacgtctaagggccctggcagcaacagccctgttagcacaagaagcagataaactaacccttaagcaaaatctgaatataaagaccccccatgctgtggtaaccttaataaataccaaaggatatcattggttaacaaatgatagattaaccaagtaccaaatcatgctatttgaaaatccccacataaccattgaagtttgcaacaccctaaaccccaccacatttctcccggtatcagagagcccagttgaacataactgtgtaaaggtgttggactcagtttattctagcaggcctaacctctgagaccatccttgaacatcagtagactgtgagcagtacgtggaggggagcagctttgccaacccctgcaaagtgactctgaagaagacgacaagccctactccagtcacacctggaagctgactggtccacacacagccgaagcatgagaaaacccattgcgggactcatttttcttaaaatttggacttttacagtaaggacttcaaatgaccttcctcagactaaggacagttcccattgtatacatcaagtcactgaggtaggacaaaaggttgctatggtcctattattttatggttattataagtgtactggaactctaaaaagaacttgttcgtgtaatgttattctatacaaagtatgtagcccaggaagtgaccaacctgatgtgtgttatgacccatctgagcctcccatgaccatagtttttaaaataagattaaggactgaggactggtgtggactcataaatgatacgagtgaagtgttagccaaaacagaagaaaaaggggtgcccaaacaattcatcttaaaatttgatgcctgtgctgtcattaatagtagtaagttaggaataagttgtggttctcttcattagaaaaggctatatggcagaaaataaatacatctgtcataaattagcactgtgtggaaataaatgtaaacactggtcttgtgtcattttggccacttggacaaaaagaaaatgaaaaagatccagtccaccttcagaaaggaaaaaatggcccttcctgtactaagggacaatgtaaccccttagagctagtaataaccaagccccttgaccctcgctagaaaaacagaggagcgcgtgaccttaggaattgattgggccagactggatcctcaactaaatatcttggttcaaggagaagtttacaaacgctttcctgagccagtgtttcaaacttcctatgatgaactaaatgtgccagtaccagaaatttcaggaaaaacaagaaatttgtttttgaaattagttgagcatatagcccagtctctcaatgtcacttc

SEQ ID NO: 1004 - DNA, 27605 bp, Homo Sapiens
ggggcagcaagggcgcgctggaggcggcggccaagactcccgccgccgccgccgccaacagggcgagggctgccggcaactctcccgccgggcccccgcacccccagaagccgaggtccgagcagccgccgctgctttgggtggggggctgacagggctgcgcgcgtcgcgctcttggctggggctgcgcgggcccggggcgctgcgggcggctcagcggcagctgccgcgctctgcgcctcctctgggcgcactgcctgggagcacgagactggtttgtctgatgctgctgccggagctgaggtcttgcctggagatccgaacgagacaccacgtcaaccggcgcggggagtcccgtgaagacatgagggcgccaggagcgcaggccgggctttcctcgcgcctgtcgaaggccggccttcccgctcgggtgtctcgccctctcgcttctccgcagggcaggaggcagtggcgagaaaaggagctgccggccggagttctagcaccgagaaggagagatgaggacattgaggatcagagatgttgaaaaacttgcccaaggatgcacaagtggaatggtaaagacaggatttgaattctgacctctctgactccgtgtcacaaactcctgaaagtgtgaaaggtttaacacaaattccttccccgctctttctctctctccctcccccctccaacttttccctttcaacaaatatttgaaaacttactatgtactgggcactattttaagcaccacatagcaaagaaacaattttggtcctttttgatcctgatgatcccccatccctcccttaaatgtttttccttccccaggtccttccctaacttttgtggggccctgcaagtgtaaaaacagaggctcatataccatacctaaatatttaaaagtgataaatcaagctggcaaagtgttaaataaaagatgctccatcctcctgccttgataaagacacttgtgcacaagggctgctgtgcactgagcatctgtgggttttggagcaccatggaggaatgtggtggctcagagggtgtggacatttagcccatggcctgtggcctgtccctcatttcttcccaccctggcagtccacataagggggtggtacacatatgtgtgtggacatcctagcctacacatccaagctgtatcccacaaacagcacctcatggcttaggggtgtgtgcactggcggtgtgacctgccgtggagagaaaaggcctggggaaagctctggaagtggacttaagaccacttggacaggggattcaaggtctctcgtagccaagacatagtctgaaagaggagaggcaggctgcagcctccaggtgggtacatctctgtgcccctcaactcttcactccataggaaagggcacaaccagaggagtactgtgggtgcccctttcctgggcctaagagtaacagcgctcctccccgttctattttgtcttccaaatcccacgttcacatgtggatattttttgagatttggccatctgaggatttttataaaggaaaatgtggaattcaaacactctacttgtttaacagagagcaggtccattgaggtgggcagatgttagatgttactggaagtggaggaatgggattttggagagacccgctggcctctctggagctacatggacttccctgcattcagcagccctagtctacagagggagaagctaggctaccccggccttctgtcttgagaccttgatgggttcatcccaaacctcgggaagtggatgcagtttagcaggatcagctctgcgccctgttcacttctccagccatgaggactgcagctctggatagactcctaaagcacacacgaaagcagtgcttcctttactgggccagattctccccgggggagcagacagaagccctctaacctgagcagtatgtgctcatgccagtgtgcattttcctgtctcccctggggaaggtttaaatcctttatttattaagaatttaatttctttatttattggtttaaattctttatttattaagcctgcacaatgtgatagaacactatagcagacagtcctcgatgtttaattcttaagaaaataggaaactatgtatacatttccctccatttaaattctattcacttctctctttgtgttaggggaggtactgaggaacgctgttttcatttgcttttacttttaatatggtgttactcagaaccagtagggtatatctattaatatatctgtatctatatctatatcacctatatctctatctatctatctatctatctatctatctatctatctatctatctatccatctatctacctacctattatctacccatctatattatctatctgtctgtctgtctgtctgtctatctatctatctatctatctatctatctatctatctatctatctatatctgtctatagatagatacatgagaggggatttttttaaggttttaattttgatacaggatctccctctgtcacccaggctggagtacagtggcacaatcatagctcactgcaagcctcaaactcctgggctcaaacgatcctccagcctcagcctcctgagtagttggaactatagatacacaccactgtgactggctaatttgtttaatttttattttgtagagatgggtggagtcttgctatacctcccaggctgatatcaaactgctggcctcaagcgatctttctgcatcagcctctcaaagtgttgggattacaggcgtgagccaccgcaaccagctggaagctggatttttaatgtttcaaagtagagcaagtggggtcgcccattagggaacacatcccaacaccttttctcctctgggtggctcccatgttcatatctcacaaggtgctctgtgcttcaggatgtctctgcagttgctcttcagcctcctctcactacacgggccaagggcactgtttgatgtttgcagcgtgtcctcttgcctcccttcaacccttcaacttatctctttccatttgcattatccctggccagatatatgctgggggtcactcatacggactcacaaaggccaatgttaaagtttcaggaatgttgtgaaccacttattaaatacagccattataaaagtgaaatggcctaaacttacatttaaatatatttcattaaaaacaaaggtagtaataataataataaaaattcattacttacaaattattttactatatgttactattatctatgctgttggggttatttcagtctattttaactgcagggtggaaatattgtataacagtgtgctctgctatgcccttttcccaactgtgtgtttcaaaatgatgtctcgttggagcttgaaatcagccatggttgtagtatttatttcatgtaaattggtaaacattatgaatcaggagtccctcccttatccagagagcctgttgttaacatttaccagcacaccatgatctgtagctctcaaatccttagatcagagtttctcagttctagcactattgacattttaggccaaataattctttgtttttttgggggtgtcacttgcattgtagaatgttgagcagcatttctggatgccagtagcttcccctccccagttgtgacaaccaaaaatgtctccagatgttgccgaatgttttctgggggataaagttatctccacttaagaaccactggcctagacaacattatcctttaatgtaagtgacttgctattcttcccttttaaactttaacatgcatctgacaaatattcagtgcccattatgcatgtaaatacaatgatgaacaagataagcattgtccctgtcttcatagaactccagtctaaaatcatggactaagctggaaatatactgagtatccactaggactagaacatgctatctgcatgctaatgtgctcagtaggtgatcttgatctttattaattccattaacactaattgcaacattgtataatgtttgcatttccccttcaggtgactgttgtctcttgggcacaggtagctgccaacaggtgagcctctcagcggatccctgatagaggtaggatggcaaatagcttctttaatatgacagcctcagtgtagtggctggcaaggagctgcgattgggaggaactggaagtgacacccaagctcattgagcaagcatgctgtgagtgccatgagtaagtagtcccagctgatgagcttatcagggggttgccagcgggggtactgcccagggtggagatggaatgggagacatagccatacctcagaaggatatgcagctcctacgaggacctaagtggagctgggtcagcatggccccagtaagcacacagcaggcagatcagccacagacttcagcatcaaggccttccagggtgggaactagatgaactggaggacaggccaggaacctgcacatatgaatcatgtgggccaaggaccttcctcccctttcctaccaccatgaagcagacccttcccccaggagtcatcttggagaaaaatgggaaagtggagcagtggtagggggcagggggtgctgcaataccaaaatatccagaaggcatttaaaattattggactagatgacatttaattctccttctttactcagtaaagtgaagagctcaggagaaagattggatcaattatagaaaataatgaaggtacattttctttgcataactaaatgtagggtaagtacattttgaatttgctaaaattgtctttgctctgcctctgcacacgtgtgcacacgtgcacacacacaaatggcacttctgggagtttttccttgctaccacctcctctcaataatcaatgctcacgaaagcatttgtgagaaatgtggagtttactgtggagattcaaagggaagatgatggaggtttcactgtaacccccacaacagattcatattccactttgatactgtgttcatcatttccaatatatacctttttcctagttgagtatttgaaatcttggaaaccagactctgtcttgctgtgttggtgtgtcatagtataattggcagcatgtttcctttggtagcaatacataagacaatggtgtgtcttatgttgatgtcttcttatatttgataaaatcttttaagtctactgctttgcagtccttcctcaactgcaagcagaggcttccccactgaggccattgagtaaagtggttcaaagtacagtctggagtcagaccatcacttactatctccaccattcacaagccaggtaaccttgggcaagttactgaagggttcaggggctttgtttccctacctgtgcaatggggataatattattaactacttcatcggattgtagtaagaattaaatgagttgatatatatagagaaattggaacagtgtcaggtggtggtgacttctagaaaagtagttgttcttatacgtattacctctttagtcccctcccacataggccctgcctcctgttacctattgctttttctttcctcccttattttataaataatacttcagtgaccgctgtttgctatttgaacacaaccttgagatctctcctctccttcccaaatggcttacctaagtatttactccaaacaaatatgttgtcttttagagatactctgataagtaaagattgctgtatgtagtaacatatttttatcattatttctgatgcatctatggtagatgcaagagatagtaagatatgagcttgactggagctgagctagcttgttggggagcattaggaaataggatggaaaaaagataggttggagacagatggcacttgaagaatctcccctttgaaatctttggtaaagtctacaatatgatacctctccatacatctctaaggaggctttgtattttgatgacagccttgaatgctagggacacccagccacacgggctaactcatacagggcagagaggactttcaccctctttaattcaccgtgtatgagtggcaatgtttcttcccaaatatatggctggccctaggagacaagtcagggcatgtgagctgtggatgtgaactgagagaacagttggggcttaggtgaaaagtggagattcaggaactcttcagatatagtggccttagggaaagatagatgtattaggccattcttacattgctataaagaaatacctgagactgggtaatttataaagaaaagaggttatattggctcatagttctgcaggctatacaggaggcatagtgctggcatctgctcagcttctggtgaaacctcaggtagcttttaatcgtggcagaacgggaagcgggaacaggcatgccacaagttgaaagcaggagcaagcgagagagattggggatggtggtggggggtgttacagacttttaaatgagcaggtctcataacaactcactcactattgtgaagatggcaccaagccatgagggatctgcccccatgatccaaacacctcccaccaggcccctcctccagcattagggattacgattcaacatgagatctgggtggggacaaatatccaaactatattactaggcagtaacaaagagacacccggcccttctgggttcaaggtgtgccacaggcctgcatgtcctcctaagcttttcttaggtggtgccagagtttgaatggctgcagtcctggcatattcctcagtgaggctggaaaaaataatccactcctgcaaatggaaaatttcttctgtgtagggtgagcacttccagctccagaaatgaaacatgctaaaggcagcgtgtgacttggcatggggtgaccagtaacccaactgatcggtcctctaacctgttagttcattttgctggtgatcttgtccataagggcaaacaactttctagctggtcacctttggaacaaagtaagagtttttgaaagaggatttaaaaaaattcttttttggtttgttttgggtttaatgagtcaatgctttattttactatgagtgtttataaccagacctaaatgtatgtaggatcttgaacctcccccacaactatttcctatttgttcccagaaaaattccaatgccagattttgccatagcaaccagaggcaaatatcaagacagcaataaagagcaagctggaaaagggtttccctacaatgtggcttgagtttctgtagggcattccatcctccgtgtggagctctggaaggcaagagggggccctgcggttcctcgtgggggggtctggtagagtccagatttgccagcatccaggacccactaggaaatgtgtctgtcaggcagctgggctggagcggaaggatcagcttgcctgctcctcgggcttggcacctgttgtgtgttgatctttatttttgtacgtcaatttttcaaaattaaaggtattgaattattatttttccattatgcttttcctctgagcagtttagtaaacaagcctgttctgtatttcctaattgtcccctcaagtgctctttggaagaaggcagtgcatatttaaaagtaagcaaatgaaaccaaagaacaggagattcttccaatatctgcccacgatgtccctcattctgtgtccttcctttttgtcatggttgttaggtaatgttaggaagtcccacttctttcccataggtaaagtcatctcactacagtatagccttcttgctgaaagaactttgggcttccgagttacttcaggtgctggtttggattagcggtgtgttgataaatgtttaacaactcgctcgcagacataaaattgccttgatttgtagagctgatttgctgatttctgtggtgtaaatcctcccaccatggcagatttcatcttaccagagtgacctcatgaacatggaactggaaagagatgcacacatttaactctcatgcactggtaagagctggctgccccacactgctggttctaccgatctaggcctgggtttctcaacctcagcactattgacattttgggcagaatggctgttggttattggtggctgtcctgtgcattgtaggatgtttagcagcacctgtggtttctactcactagatgccaggagcaacccttccccactaagttgcaacaaccaaaaatgtctccagattttgccagatgtctcctgaggggcaaaatctcccttagttctgggctattctgcactgatagtgcttagaaggtccattcagcaggcagtaggcctgcactgttagcttttccatgaaccactctgaatatgcacccaaagaagttctctcttggcattttggatgtggtgcattagtctgttctcatgctgctaataaaggcatacccgagactgggtaatttataaaggaaagaggtttaatggactcacagttccagatggctggggaggtctcatgatcatggcagaatatgaaggaagagcaaagagatgttttacatggcagcaggcaacagagcctgtgcaggagaactcccctttataaaatcatcagatctcatgagacttattcactatcatgagagcaacatgggaaagtcctgcccccatgattcagtcacctcccaccgggtccctcccacgacatgtaggaattatgggagctacaattcaagatgagatttgggtggggatacagccaaaccataacatgtggtattgcaaaacactgaaagtgtgcttccttgggtagtcttgagaagagtcatgctgtaaggacttaaggcaccaaaaaattaagacacagcagggccagtaggagagcatcagggtaattccactataggatatatcctatatccattataggatagttttgacagactgcagaggtcccttaggcaaacctttcctttgtatgggtgagaaattagactcagggacaaggtgtgacttgtccaagggcaaggtgtggatgtgcttggacagtcacaggggtgttgtggtgaatgctgtgagacgcctgtgtgacatactgggaattagaactgactccaacttgtagctaaatgtgttttgcgggcttttcaatgttgggtttggatggatatattctgacatctccctgtcccctacctctctgtccctttggaaatatctgcttatgaaaaccatattataatgagggatttctgtttcagatagaattattcccttcagcttcaggagtgagttgattattcacatgttctttttagggggtttaagctgctagtccttaaagaatagatgctgaaggttgtcattgattcctctttccttcctcccacgtctgctctgggccttctcattgatgtagtatcttaggttacttccaaaataatttgagaaatggatttatagaagaagctagctttccagtagaaaagtttagatgacaagattaatgtgataagaactaagaaagcccttcctagttttcattgaaaatgtgtttttaatgcccagaggtgcccagtcaaaaaggaaatattacagaaggattattttcatcagcagagttcttgggcattgcaagttccagtgtaattagggaaatcacatgcgagtacatcaatacacttcagatgccaatacattgggcttaatgaggacaacaagcctgcttttattaggggattgaataaaagtgaaaggagttcttgaaaagaattggtaattttggatgggataattcatcacttcactccagatcagtttttcacagtaagaagtgctggctcttcagaaaatttggcataaccaaagtttattgtcactatctcctccttctcacattgtcctttgtcgcacccccagcaggtccacagtgatcctgcgggccacccccatggaccctgcccgttttcttccatcgggggctatcttacgtcagtctttcaaggtctcctcagtaatgcaggccagttggatttttgctttcttttcccagaggacaattcagcctcagcgtcttagtctaaaaggattcatgcaagcgtgtcagatgttttattaggctaagggggaggtattttgggttgtggggagcacttactgcaaccctgtatgaaattccctactcagtgatgttcaggctgcacgggccaacatggaaagggcttaagggagatgacaaaaacaaaatctcttcttccacaaagattttcagttgatcaattttgttacttttttgtgatgaaactatctgcactgcagctaatgatttttttctgaaggtggaaaaggtaggagcaacagctttcagttctaaggatacattctgttgaccttcataagccctaggaactagaggggcaagattgaggaggaaatagagaaaataatttgctctatagtattttccccctgagctgccatctggggctttcagagcttagcactgcactcttgcaatgttgcacacaccacaggagcaatatcaagagatgtcaaacatgagtggtattggtcactggaaacagcagattccaaatagctgtctcaccagactattctttcagaagattcatttgtgccaactacttctttgtcatggatccttcctggttctgcaacacagatgtggaaagtgaagagaacacgtcatggaattccatttctaagagtggaaaatatacaatttaccatgggatgtttaagatattaatatattgttcaccatgtgtatccagagctttagtagaagtaggttaaaagagccgtgcatgtatacacggtgctcctcattgtcaaacgctgaagcctgttacaggctgggtttgggggctgggggtacttacgggacaaagtctgactctcggtctgtaggctgagtgccttcttagtgtgttgggactcagcatgtattcaccccatctgtactcacaagcctaattcattaatcaggatgacttactgggctgtgagccctttgaggacaggaccttgtacctttatcttgtgcctctcatgcctagcatagcaccaggcatgtaacacgttctttttaaaaaagtgttttacagctttatcaaggcatacatgatgtcagatcaactgcatgtgtttaaagttttacacttgatgagttttgatatatgtctatacccgtgaaaccatcactgcaatcaagataataaacgcattcatccaccctaaagtttctcgtgtccctttgcaagccaccccccttcctcccattgttcccagacaaccactattctgctttctgtcactgcagatgagtttgtgttttctggaattttatataagtggaatcatacaacatgtactctgtttttctggctgttttcactcagcataattttctcaagattcattgaagttttatatattaatagtttgctacatttcattgctgaatagtattccattgtataaatcataataggcacctaacaagtgtttgtggctttacactgacttgaaaattaatttttaagaatataattgggcaaaaagtggacaatgggataccactctattcttggtgagtgggttcactcaggaagtggaaataagaatcaggagataatttggcatggtagagacttttgttgtcatccaatatctatttttccttctttcttagtactggaatacctgagttttggctgggcacagaactgtctggaatacagactgcaattcccagccttctgtgcagttctgtgtggccatgtgactaagttgtggtcaatatgagtcacggaagaatagaagaacaactcagaggaggaagaagtcagacatagccagacacggctgctagcagttccaccaatgaaagaggagaccaggatgtttaaaacaggcaaacacaaggtgcgaaaaaccagaagcgaaaacttctgaggtcatttaagcaaggactatcgttatccccggaagcagagagaagttccctttgcccaacatcacactgcaagcacgtgttggagctgagattcaaacccaggcatccagggtccagggcccatgcttttaatatattccatatcttaggagaatttcccctatttaaacaataaaagtgcaaaaatcttgtggctagccaaaattttcagttgtttggaaaacttatttatccaataagtggaaaactcacttgtcctccaacaattctggataaatgaaagaacgaattgaactgagactggaatccgggtctcccagtactttgtagttcctatccatatggcttgtcaggaaggccacagggaggttaactaactctgcgtaaccagaaacaatcccacatcagactgttggcagtgggagtggaacactcagagctgaaccgcatgcaagatggttgcattttcatttgcaatgtcgtcatcttcctcatggctaaagaggtattttggagttgacatgaaggctactgtaatttttagaggcattttctttctggcctgtatttacatattgtggtagaagagtcagaagacttcaagcttcaaaagtgaatcttgttgcgagttacaaaagcaccacccggtggggtgcagctctcagcatgtgtcaccacaggcactgtgatttccctgtcttcatccaactttggttgctgttcttcatgctcaggaattctgcaactgctgtagcttttgctgttgttatgtctgtaggtatggactcatttctaccattctggaatgaaacattatttcaagggaagcttctcattgtaaaaggtccacacattcagaaggaaactgggagtacattttctcataggcctggagcattaactgactatgcatctttcccctcagtgttgtcatcatgttgtaaggggatgagtcatggacaacattttcacacacatacgtgaggtccattgaccagtctttaggacaactagaaatcttttctttctttgttttaaaaaggaagacaagtcaagatacagcaaataaaaatgctcagcacatttgctgaaatcttagcaaaatcaaattactagtaatttgttaatcacactatacctgttttgagccaatcctacttaacccaccctccatcttcctcatgcttgcctccctggtgaactcctatttatgttacaaagctcagtgtttatgttactacttttgtgctatttctgaacgttaaatgtacctctattatagaacatatctcatggaatagttattattgcatatccactgcccttgttaggctgtgagtgagctttctttctttctttttctttccttccctccttccttccctacttcctccctccctccctctctccctccctccctctctccctccctcccttccttcctttgctccttctctctttctctctttttcatttcttttctttttttttaaatttgagacagggtgtcacaaatatgaatgggacctgtgaatatgatggctgtcactctctgattagattacattatatggctaaggtgaaggaattctgcagatgtaattaaggtcccagatgagttgatattgagttactcacaaaggagattatactggatggccctaccttaatcagggaaaagcccttaaaagaggactgggcctttcctgaaggaggacagtccactgctggctttgaagcagtaagcagctgtgttttaagggggcctatggaggggcccatgtggcaaggtcctgagggtggcctctaggagttggcagcagttcccagccactggctagcaagaaaacaggtggttcagccacatagccacaaggaaatgaattctaccaacaatccaaatgagcttggaagtggatattttccatggtcaagcctccagacgaacaccttaactgtaacatatgaacagctgagcagaggacctgcttcagccatgcctggactcctgacttgtggaaactgagataacaaatgtatattattttaagctggtaaggttgtggtaatttgttatgcaacaatgccgaatacagtaggcatcttaaatgtttgttgaacttaatttaatcagggaaatataatatttaaaaggaatcttttctaaagttttagccaatttaatgaatgtagatatcttaaagaattgccatcttcctttggatcttctagccatgcaatcgacttcacaaacttccaagttttcataaataccagcttctgattgtctggaaacaggaagtgagattctctccagccatcatttggcattcttgggagatagaatggataaaaattgatgttgaaatgagaccaccatcatttttcagtctgctcaccacgtacagagctcaggatgattagaaaatgtaaaacacatgtgagtggctcaaacccctttagttaaatcacatttacatagatcagttttcccaagggatataagttagctgaacttaagcaattaaaaaaaataaaactaaactaaaaccttttgctaaagccaaaaaacatggatgagttaaactgtatcagatggaatggtttgttttgaaaagtgtttggtttgttgtctatatacgtgcgtgcttttttaaaaggcagatagaaaagcagaacttacaagacctttagctgctgaggtggaaagccagtattacttctaccacagcagttgatatcatcggtctcaccagcaggtcacggatttgttgcttgctccctgtgacaatcttgaaccattgtagggaccttggcatatagagggacggtgaacagggctgaaaacaaaattgaactcaatcttgagcttggtattccaccgagagcaggttttctgggctttgaaataccgcctcagagagaccttccttgatattctgccatgttgagaacaagaacaaactttttggccctggaacctcttccctcccagtgccaacatgttcaatttcatttgcccttggctaaatgtagcttcctgtttctaagaaaagaagcagaaaggggcttttgaaggcctcacagacagtctcagaaggcttcatgggcagcagacaactcttagcaaacaacaatttgatgagttaagtgtaaacggctcagagacatatggattacattttttgggaaatacacatgggcttacaatgtaaaactgggtagtgtggggtggggtggagaagggaatgcttggaaaagtgtggtttgggtcttgctaattgcaaaatatttgaaacaaataatttgagatgttttgctcaacgtacagcgcggttggatttgccctttccatctatttacgtgtcattttcagattcggctcacataccaatactggtttgggtcttgagttgatttttaaaaatgcagttattttgaaaggtcatgccatgtgatttctgtgtagcctctgagcataaagggtggggtggtataggggaagaactgggcatttagaaacctctctgcctgtaggtcaaactgctgctcagctcttctggtatattctacttatggaggttccaaatccaggctgtgttagtaagatgcagcagcctcagtctccccacctgtaaaatggggacagtaatacttatcccagaacccatggcgattgggatgctgtgtggtgtggagttaaagtgtggaccctggaggcatatacctgtgcatatcccagctctgctgctgatgtgagcttgggcaagttcttcagcttccctgggcttttgtttcttcatctgtgtaatgaggaatatcttagcatccaccacatagggttaccttgagaattaaaagatttaacccagtccccggcacacaataagtgttcagcaaatgctaacagtggctcttgttgtttataatttatcttgttctattaagtatatgaatacagtagataataaggcaaattcacctccaggctggggagaggaatagccccttaccaaacagtgagggtctccttcagcttaccttctttttcttattgtttcaacctatggattaattacctagttttgtgaccccaaaataaaagggtagattccttgatctaaaattagactcatcttttccctatcctaggaaggatccgtttctctcttctattttaccactgtctagcacctggagacacttggtttaagagcccagctagtttatactagagtgtgagggaattctgagggctcaggtggaaggaaagcatgattccagagtgttgttgggttaatgcattgcttctcaacccttcctgcacattagaatgaattgagaagcatttcaaaaataatagaaatgttagtgtggggcttcggtattagtacattttttaactccccagctgcttctattgcgcagccaggactgagaaccaccctggctaaggcattcagtggcattgtaggtgcttccctgggtcgtttctgactcgccccttttaactcactggcccctcggactctgatttctgcccttcatgcagtgggagagctttcctctggggcttgccttgaggtctgcaggagcaaggccacttcctctctgaatcctagacacaggctttgggtcagtactcccacccacgtggagcccccttctgcccctctgctctgggggatcttgtctgaatccatcccttctttgcctgccttatgccttctagctactattcctctgcccttcctttcttgatcagcacaattctgctgctttaagtccttttttccattaaccattgactgccctttgctctgtcaaacatagttttggaggctgtgtagtgtagtgaaagaacagggaatttgaggttggacctgggtttaactctctccttgattgctgacaagttacttaacctctactcatttgtaaactaggaataatctgacctggatgagactgctgtgaagatgaaaagaggtaaaggaggggtgatggtgtggtagtggtggcctggtgagaatgacggtggtggagtgatggtgataatgagaatgatgataatggtaatggcggtgttgcggtgagggtgttgatgtggtggtagtgctgattttcgtggcaggtgatggctatagtgataggggtggtggtgatgatggtggtggtagttgtaatggtgactgtgatggtggtgttgatgatactggtgatagcagtaatggtagtgatgatggtaatgatggtgttaatgatggtggtttgatggtggtgaacatgacagtggaggtggttgtagtaatgatgataatgatttggtggtggtggtagttgtggtggtggtggtgatggtggcagtggtttagtggtaaaagttcagtcaagaaagaagaaagctggaggaaccaacagtattctgatcagaggaaccacatgggaagcattgacagagggtctttgcatttgctaaggccatgggagtagctggttgtatcagttagcatttgatcaggaaatcagagctactctgtatgacacggaataagggattaatcatagggattaaacttacccattatgaaaactagtaaaaaagtctaggcaaggctgttgcctctgtatctggtgttgggcttgacgtttctttgggtcagcagggcttacagatgggacagaaagtggatggaaaggggagagcaagaacaaactggaccatgtctctgactctcaccacctgcagtggtaacacagtgacctgcaggaaaagccaatgcctctcatctcaggcctggacatgcacctgggtcaggactctgggctggaggagacccagggagccggaggtactggagccctgctccatcaaggtgaggcagcaggtctgagatatatgtgagctgctgctgcgccgggtccctaattaaacctcctgagtggaatggctactgcttcccttctgccttccaatcttctcacagatttctcttgttgccagctttaatctggaaccatagaggaaggaactttgggaaatgtggttcctgcttagttctggtggcacagcacaagtcactgccgaggggtccccatgtggattggatgggttaaaagcttcagcacctgtagtggcctgtgcagtctacttgctctgacatttcaagcctggagaggcaagggggacaagagctgagctgagggccatgccagggaactggacaaggaaggccttggcactctcaagtcagggaatagcctcgccatttcatctcatccccagatgctggagtgcgttggtctcccttctaacctctaaccactgaaagggaccctctgtacaaccaatccttgactttggaatcatgggctgagtaaggctgaaacatttagccgtctttgggaccccagtatttccctagtctcactctagtgtctcttgaagtggctgtctttcaaggtgttgaccctactccctgtttctaacatctgcctgctacataatccagctggacttctcaggtatccctggtggctgaactccttagaccagggagctcccctagtgcctctagtgctgacaaagtgccactttgcaacagtttctgcccttttcccggttctctggcttctaaagccttcatttatccacagatagaaatacaatcaatcccatccttactctttcttttgacaattttcttcatcagatatacacttagaatttaactcaactgtgttctctcctattttgtcggtcactgctgtaacttacatggaatcatggttgggtggcagggactgaagtagttagttctcacttatttactgtgaaatgaatagtttgagattcggtcagtagtcagaatggtattcttcacttcctccttttctttatttactatgctacctggtttgtgaacattttctccagctgcaagcaatttacacaaactgtaaactctttatccattataatccctgtaactatgcctagagactggaaaatgaccagttgtcattacattcggaaaagcatagaaaggatctccttacttgtggccctacacctggtacttttcagatagtagatgagttattaggatgatttgcacctcagttttcttatctgtaaaatgggagggttgccttgcatttcatgctgtgttctttgatgccctgggggattgccggattgccagaggactcattgggaatttggggatggggaagagcatgtgtctagagggccttcatccctcattcaactagcaaaaagccacttattctgtgttatatatttggtttctatgagagattggattattggtcagcaataaaaatcactcccttccttcttcctcttggagcagaccgtaactcccctgttctactgactttgggcttggctatatgactaactttggccaatgaaatgtgggaggatgtgatgtgaatagaggctttaaatgtacttgcatggtttggcttacctcttgtactcttctgtttgctgtgagaatatgctgcagggagccactggtccaaggagaagaagaggggtgtagaacagacctaaacccaacctgtagcctgaaacagagccgagtccagcctagatccacttatagtcaacctgttgatctgttagcacaaaaacacatgctgccataagctgttgtgttttgttacacagctatagctgtctaattcagcttacaaataagttttgtccataatcatattttttggtttaaaaaagtttgaaaaccactgggtttgctgagttttcagctttcccatccacttctactgtcctgtttctttctctttgtgtatttaggaaagagagggagaaagaaagggttttggaaacaacacagtctggtagaaagaaagaaaggataatttttttcttttgaggaaagagggacttagggagctgggaggagagataggcacattcatagttaaagtatgttttgtttcttttttgaaccctcaagtaaacatttctccactgacattgttttgcactgttacattattttgttcactttagtgttccatttgtacaacctctgaaattccaggaagaaggtgaaagaataacattgcacatagccctgggttgtgctgtgtttacttcatgatggaccgttcacttgggcttaaccttaaactgacctttctgattccagacgagacagcaaagctttgctcacagattcaaaatcagggaacagaaacagctgacttccctggccaaggatgttttccattctcattatttttgtccgtggtcacaaatgagatgctagggaagtaatttttaggaattcctggagtactttacttctgatgtgcatgcacagataccctggggtcttatgcaattggtaccccaccccaaagtctggatatattcgttgtaggatgaagagagggaggaaggaaggaggactgaggaaggtcttaggctattttcaagctcttttttgctccgcactttgcaacatggttttattttattcttataagttttgagatcatctcaaatataaatacaaaaccattgatcaaaggccaagaataagaaatatttagatgccctctattgcagtgaaaaagcaaatggttgctatatcatgcgtaaaggtaatctcttcaaggattagcactttaggtcagatcatggaagcctggttttgtttctcagaaagagtgtctttctggggcttgggaggccaacacgaggcaggctgagctttgtctatggcaggagctgagtttgagtctatctctgccattagcctgtgctcaggttgtgtccctacactgatggccatcagaatttgggtatcaagtgattcgcttgcttgtactagattgagctcctttgaggacaacaggagccattaatattttagagccagaggccaggcatggtggctcacgcctgtaatcccagcactttgggaggctgaggcgggcggatcacaaggtcaggagatcgagaccatcctggctaacatggtgaaaccccatttctatgaaaaatacaaaaaattaactgggtgtggtggtgtgcacctgtaatcccagctacttggggggctgaggtgggagaatcacttgaatccgggagacagaggttgtagtgagctgagatcacaccattgcattccagcctgggcgacagagcgagattccatctcaaaaaaaaaagaacttagaatctggactggtataagccttaattcaaatgccatctttgccctgtacaaactgtgtgaccttgggcaaataaccagttctttgtttcttcacctgtaaaatggggataattagtacttttctcatagggatgctgtgaagagtcaaagatataatggttgtagagtgctcatcacagagcctggcatgttgtatctgctcatatatgttagctatcaccatcattgctgctgctgctgtttttattaatctagtcctgggaatttatatcatggaaaaaagccaaaaaagttatatgcttaaaaatgtgtattgcatcttgtctatagcaatgagaaattagaaacaatctaagtgcctcattcattcagtcaatttaacaaatattttttgaagtcctattatatgccaggcactgtatcccactgtttggggtacatcactgaataagagagacaaagatccctgcttttgtgatggagaatgggtagctaaactatgggacaataattcaatggaatgttatacagctattaaagcaatagcaatgaagacatgggaagttgtttgtcgtgtcatgtaaaatcaaaaagcagaagaggaaaacatagatgccttaaaatatatgtgtgggtggacagagactagaatggagcatttaaaaatgcaagtggttgttagagtgatggaatcatgttttttgtttttcagtaatgtttgaagtggttttacaacattatggaaaaaatacatatatatgcataaataattgagaaaaatgaactggccctaagagaagtttcttatggtttaggaatcaaagtaaggcttataggcagaagaggaaattgcctaggtagcaaggaaggaaaaattgctatttcaaaccaaaaatgactgttgcagttccactgtgcactggaagcatggaattcatgccaaggatgttagttctttgttaaggaaaacctgttaagcagatgagtaaaagaggccctgaagcctctggagagaggagagttcagacttaaacgtctttgtataataaagtaacagaagatttccattttccctcagcagtttggggatggaagggagaaatagagattcagaggctggagaactgggagaagatgagtaaaggaaagagccagctaaagaggttggaagagatgaggccacaatagcaacttgaagaacactgataactaatactcaattttaagagattccctgtcccaggagaccatatgtctccccactcttaccttccctcaggagtctccaagagggcactgtacccccatgggataggggttgttatggtttggatgtccccaccctaatctcctgttgaatgtaatccctaatgttggaggtgggacctggtggaaggtgttgggatcaggggggtggatccctcatgaatggcttgggccatccccttggtgataagtgagctctggctctgagttcacagaagatctggccatttaatagtgtgtgacacctgcccccacccctctctgtcttgctcctggtttcaccatgtgatgtgcaagctcccactttgccttctgccatgagtaaaagctccctgagggctccctagaagccaagcagatgctggcaccatgcttcctgtacagcttgcagcactgtgagcctgaaacttttctttataaattactgactttcaggtatttatagcaatgcaagaatgacctaacacaggggcttgggtcattttgtttggttattaaaagaaggctgatgtcatagaatattcagggttcacctacacaggggggatctgaggggtcagaagctacctgtttcaaattgactgcttttggggcctgaaatggcttcattgccaccactagcaatatgatcttttgcaaatagacaatctaggatccctgattttttaggtgcagcaaggtctgggagaagtgttgctcttccatgaagaccttaaggagaatgattctgacagatcattgatcttctgaggcaggaggctgagcaggtttttattaatgggtggagaagggaacagtgagcacacaggagagtgatactggggcttggagactgggaggcgggaggcaggtggtgggaggaagccttctgcagcccaaagtctcttaggacaactggggagtggtctctagactctgaatcctgctcccaggagaccctgtggctatgccccttttgggaatggtacttaacttaaaggcctgtagaataacaaccttgtatggccttggaaaaccaaggtgggggtggggaggagctgtctgccccaggtgcaggctacatttaaaaatgctaataaaataaagtaaaacaaactgctttttattatcaccatgtgccaacagtcagtgataaactacccctccctcctggggcagatggtttgggccgtccgcatcccctagtctggccaggctgtgggatggcaaacagccaaagtaggggatccagaaggagcacgtgcaggaagaaaacccagattcctcacactggtaaataagaggcttctcaggactgaacttgaaaaacatgagccccaccaagggcgggacaagaaaatcctcagaagacggctgagcagaggttaagcaaacatcggtgccaagccagtggcagctcggaaatgaaagcccagagatgtgatgatttttaagagttgaactgagctgcaagcttgtggatcatgtaagtgctaacagaggcagacggagaaggaagatctgtcatgaagtgctacggtgggaggtgcgtcagcttggggtggaggggtcccaggtggccccaggagaagaggcctctgaacaaagaagacaatgcttgggttacggtggaagggacacggaagggtctggaatgctggaaggagccaagagcagatgccatcttggtgatgtgtttcatcttcaggacctgagacccatctggtcaaatatttgtgtgtatatgcaaaattttaggtcatttgttaaaaggagctcatgaatacatgtccttgacttcccagagatggaaaaaacacttctctccgccaaagaacttccaaatagtgcttctagcctatgctcctcatcagtgtccatgtctctcagatgtctctagttttggttgaggaatgaggaaatgtggttgcctccttttattggctgattcgtctgctgagctcctaacttcttagctaatctaggtgaaaccaacccttgtcctggaccctgggcttttgtggaggactgtcttactgttcacaaatactccgccttttccatgagaagctaatttatccctgcctgttgaaattgggcatggacaatgacttgcttggttgtctaataaaatgtgagcagaaaggatatgcgtcacttctgagccaaaagttttcagagccagtgcatggttggccatgttttctcttgcctttgtaggcacacaataaatgtttgttgaaaaaagatgaataaaaggaaagagccccaattaggagctgggttagctgaggcctattcccagagtttccactaactagctgtggcataatcatttggctactctactggccataaatggttctttgttattttgaaatggagtctcgctctgtcacccaggctggaatgcagtggcaaagcctctgctcactgcaacctccacctcctgggttcaagcgattctcctgcctcagcctcccaagtagctgggattataggtgcacaccgacacacctggctaatttttatatttttagtagagacggtgtttcaccatattggccaggctggtcttgaactcctgatctcaagtgatctgtcagccttgggctcccaaagtgcataaatggttcttaagatttctttttttttttttttttgagatgggggagggtcttgctatgttgcccaggctagtcttgcactgttgggttcaggccatactcctgcctcagccttggagtagttgggattatagacgtgagccaccatgcccagctcaggattctttcatttctaaaaccctgtgcagatattgcagaagtaaagtgatgatttttggatgcttattggaagtcttgttcatgctggtgaatggggaaaagactttgggtgggggtagggagcactgattggcaagttattttgtgtttttaaaacaaaaatcgctcttcagggtggtgcactattcccagattttctctggaagctgtgttccaacacctttctcagacttccccacactccccctcaggacatcagaaggagggcccccgaattcattcttgcagcaaagagcctcaagactctgctcagaccaggaaatgagggacctgttcctacaaattgctgtcaaaatgtattcttaatatttgttctctggagtcactgttttggtgacctcagtccctggaggctcctcctgggggcgataggatgccttcagaggggagctgacagccctgtgttgtgtctgggctcgcgggaggccatcgctgtgtccattggagccagatgttttcccagcccttaacctgctgtggtttcttagctcaacgtctccagtgcgactctcccataacacccagcgccatcttgtagacgcgctcatgcttccggaccgcgggcgccccaccgggaagagcgctccacgctgaagaggaaggaaacttcacacttaattcatcaaattcaaactgagctgtggtgaaaggaacggggcagagtgaaaggaacacccatatgccccagaagaccccggggcatcgctgcctttcagcttcttttgcgctttctgcagctcgtgtcacattccaaggacactcagctccgcacatgcacagagggccgcgtctgtcccgggggcgtgttacctaaaaccaggcgctgacctccaggtcaggaactcttgagtatttaatctctccgccgttcatggctacccgggtggcctctgaaatattacttaatgtctctgggttctgatttcctcaattgtgtggtacccagtgaccttacgatgacatttcactacctacgaaaaatggcgccatctgaatgtttagtctttacctagaagtataagaaggggtttcttgcctgggaatgatcctgtgaagctgaggtcacagtttatcttctcaattagggcagggattagtacaacagaaggtcattcgtcaagaaaaaggaaagcttctccctttccaaaaatgcaagtagtgaaacttacatttctcacttttccctgattgctcagaactaaatataaaatttaattggcaagtattttagcacttatttttaacatattttcttttggtcataatttttaattttattaaccttactgatttgacagggtcaaatctaaataaataataatattttatttattatacaatacataaatttctgcatagcttgaagggaccttgtggattgttaaatccaactatgtagtttacagattaagcagttaaagtctgcagagaagggacaggactaaatgtcatcagcttgttagttccaaagctgggtgggaaaagcagttcttccttctgattcttagaccaataattcattcctccattccataatgacgattcttagaacgtgaccttacctgtaacagtagggacaaagcaagacaattgtctttgagtttcaggaacagactttttagaattaaatagtttcaggtacatgctatagggaattcagttgatttgtcctggttagaaagcactttgttcacacctatacatatgactctaggttatgggttcttctggagtcttctgaacctgctgggcatttctgactggatgaaaattaacaaaagtctatgttcatcctgatgaaaattagcagcagttcatcttagtttaattgccacaacgtgcagctatgagagtatgtatattttcattcacgtatttgaaatatttatggattgtctgttatatgactagtactaggggttctataaatttacccatataatgtgtatgtgttaaatatatattattaatatgggtaaatgtaatatgtttatataggtaaatgtaatctatttggtatgtagatacacaaatttagagtatataacagatatgtttctgtatagacatatattttggagacattctgttgtctggcttctttatattcccatatgtgctcaatttctgtattccctttcctgattcatcgttttcttctagtattgaagtagaataaaggcaaccatgtattgtggagcagggggtacacaacacaattttcaaggactcatttctacctctacagccatgcacagcagccttgcagttcaaatcacgaagctaccacccatctgatgacattttgctgtcctaatcggaaagggtagctttagacaaaatgaaccatcttttgagggctgaacttgcaaatatgttcgtgtgtgtgtgtgtgtgtgtgt

SEQ ID NO: 1005 - DNA, 787 bp, Homo Sapiens
tgctgaaaggaaagatggccaaaggaaggaaagtggccccagaccctgccgtcgtgaggaagcaggaggctaagaaagtgatgaaaccgctgtgtgagaaaaggcctaagagttttcttaggcaggcattggacaggacatccagcccaaaagggacctccgctgctttgtgaaatggccccgctatatctggttccagctgcaaagagctatcctctataagcagctgaaagtgccttctgccattaaccagttcacccaagccttagacccccaaacagctactcagccacttaagctgatccacaagtactgaccagagacaaagcaagagaagaagcagagactgttggcccaggctgagaagaaagctgctagcaaaggggttgtccccactaggaaatcacctgttctttgagcaggggttaacactatcaccaccttgctggaaaagaagaaggctcagctggtattgcacatggtgtggaccccatcaagctggttaactttctgtctgtcctgtgtcctaaaatggggggtcccttaatgcattatcaaggggtaagaaggcaagactgggacatccagtccacaggaagcaccactgtggccttcacacaagttaaccaggaagacaaaggagctttggctaagctggtggaagctatcaggacaaattacaatgacggatatgatgagatctgcaatgtcccgagtccaaaatctgtggctcacaatgccaagctggaaatagcaaaggcagaggaacttgccactaaactgggtt

SEQ ID NO: 1006 - DNA, 7063 bp, Homo Sapiens
gtaaaaacttaaggtcttattcaggtcattactgggcctttgtctttccctaggcaggtatgttggctttctaaattctctcacatatgcaattactttttagtctccaaaaacaggtgtatcccttttgaatcccttggtggctacttcagtttatggaggttggataactggtgaccagcctacatgcccacaccacatttatcagagaagcactccataattagaacacagagccctggtgtttggaaggccaggtctttattgtctaccctggctccagcaagacctttcacccttgaatgtgggttatggaccccaatgccacatgacatgagactatagagactgtggttgggggatggtagttgcaaccctgctcgtggcttaaataaagcaaagattaccataatgtaccagccaagctgtcccctggaagctgcaagtgttcaaaataaactacggaggtttaaaatgtttgcctcagccaatttcttccaatataattgtgcagatagagatggatttttggtattttgtactttgccatttgtcttgacttcattctcctaaggatcagttttaatagtgaagcataattactctttgaagcatgttagttttcctgtattggaagtcctaatttgttcctcttttgttaaatttaaaatgtgtatgactcattatattggcatcctgaaataaataactctttgtaatccagacattttgattaatcagaaaattacactaacatcctagtcaattaaatgtctatgcagcactgtggtcccactttgcagagtgactataattgccttgctttgccattagtaattgttctagagtgtgaaataattgtaagtgtatgaaagctcttgtagagagaacttcacctaggcttgtggcattcactattaaagcaatgagtgccttctggggacagtcagctcaactgacttcaaatttttgcagagtgtcatcacaaacactaagtatagatttcagtttgaaaaactttaaatttaccttttattgcagtgtttggtggtataaatgcagctaaaagcatgagttaacaaagtgagatttagaaaggaaatgtcattgactgcctgagctatgtacttcatggaatatgtttttgtaataaagcccctagaaaatcgggaaacttatgaaacaagctttacatatgtatatgcatacatatatgtttaaaacttatattggactaaggttagaatacttagtgaggtctaaaatgacaaatggggtgtgagaatgtaagcaaagtaaacaaggactgtcagttcttaatttattagcagcacatgctcaccaggaacccgttgtcttaaagccaatcccctgagaacaaacagcattgagtctgaaattcaaatttcccagaatggaaaatgatgagccctagaattttagagtcttgtcattaaatttgcaaagttcagttacaccacagcccagctacttaccaagtgccttattactcttctctttgggcctacttaacccaactaaagaatcagggagtcagactaaatatccataaaggtcctcctaaagacacatcctctggttcattttgaatatctaacttaacattctgtccctgcaggtgttcttttttatagcatcattttagagctgtagcctatctgcagaggaagagctacaggcaggtttggagtgcatgagttcattacaaataccgtgttttataaattgatgccagtgttcttgacctgtcttgtgaacaactgggaccttatttcctgtgtcactctctcccctttgcatcttaacactttcagctagtcttagaggtttccattgagttctgaggacagactttcagaatcctcattctcttgcttcctttcctccagagatatttctgttcattattgtccttattatgtgttttttttttctgattatgaggcaactaaaatcatctgattattgatcactgtgttgaacctctaactgtatttcttcaatggtttgatatatttttcctttttttgagatgaattctcattctgttgccaggctggagtgcagtggcatgatctcagctcactgcaacctccgcctcctgggttcaagtgattctcctgcctcagcctcctgagtagctgggactacaggaacgtgccaccatgcccagctaatttttgtatttttagtagagacgatgtttcaccatgttggccaggatggtctggatctcttgacctcatgatctgcccacctcggcctcccaaaatgctgggattataggtgtacaccaccgcacccagctgacatatttttcatagttaatattgctagtcagtatgagtttttaaatgtgcatatttcgtttactatttttcttccttcaagcctctgaaaatattgatggtgtctcaaaattaataatttattgattgaaaaaattccattgatctattcatatttatttataacgtaccaaatctagtgcaataagtagtcccaggaatttggttcccatttgggagttatacttgaatttcatttataaacccaatttctctcctctggcacatgtattcataatcatcttagcatgcttttagttgttacagatgaggtaactgcagtttgatgtttactctacactctttttcacctgcaaatgttagctagagctgcgtggtcctataagtttgctgtacccttgataaaagaacttacattttataatcattgctatggctgtactggatcgtggatccataactctacaggtttgtcaaacactaccaaatgctacaccacaaacactgatctttattctttgcttattaaaacaagcaaccaaccaggttaatgtattccaagaggaaaaagaaattgaccaaactaactttggaaaatggtaatttgactgcataaggtttacacaaactgagctgtgtgtaaacacggtatctagttggtaattttatcacagggacaaaagttaattctgacattacttttcattttcatttacactaggctagagaaaatgaataagttgtagagaatgtgagctagattcctcactgttacagaaggaagttataagttagaaagggtacaagactagaaaaaatcctgtggtgccagattagagttaaaaatatcaatatatacgcagatagatatgtagataagatagactcacagagagatggtagttaggcagatagatagatagacagatacatatacatagagattgatagatgatgtatatacatgggttaggacacactattgcttgttctgtctgctaagagatacatgcatcccgtaagcaatgagcataaatcttggtttctaaataacattctccaatataatgattcagatctctggagcaatgtttgcttctaggactggggcagtgaaaacataagatgatcctggagcatcctgatgtgccagcaggccagaaagtgctcaaaacacaaggatgtggcatgcgtcgtaatccaaagtaaaatataaagagacgtgagtccatactatgcaaatacattgttaattaaatgaatgagaaggaagagactaatctttcccatggaagaatttcaaataatttatgtagaaaacatgagggcaaagaaaatcaccattagaacactatagtgatagtggctgttggcaagatccaatgagggacccatattagtgggtgaaacttgaggaggaaacagggtatttgcaaagcctgaaagtatctttaaccgaatatttactaattaccatggttgttttaatatacactcacaaatatattgttatttctgccttaaagaggtggagtttaattttcctctccttaagtgtgggctggatttagtgactcaattttaacatatagaggatggaagggaaaaataacctcgcagaggagcaacctggcagacacaagctaaaccgagtgattgcggttcatgtcaccagtgatgccttatccccataggatgtgatgaaaaggccacctcacctctgcaacattcttccctcaaatccataatcctagtctagtcagacaaacataaaccaagggaactccacacatatccaactggttttcagcaaaagtgccaaggtcatgaaaaacagaaaagattgagacactgtcacagagtcaaagacactaacacatcatgatgagcaaacatggcacagtaccctgtattggatcctggaaccaataataataatagaaaagtggcaaaatccaaatgaattgtatagtctacttatagtattataccaatgttaattcttcttagtgttgttaaatatattatagttacatgagatgttaaccttaggggaagttaaaggcatattgaaaccatccacactatctctggaactcttctcaaaatctaaaattacttcaaaataaaaattttttaaatcaggaaagaggctaaagcgggctgggtgtggtggctcatgcctgtaatcccagcactttgggaggtggaggtgggcagatcactctagcccaggagtttgagaccagcctggccaatgtagtgaagccctgtctctactaaaaatacaaaaagtaaccgggcatagtggtgagtgcctataatcccagctactttggagggtgaggccggagaattgcttgaacccaggaggtggaggttgcagtgagctgaggttgcgccactacactccagcctgggtgagagaaaaataaaagaggctaaagcatcaaaagggggagcagggaagcagggctctcttttgtcttaataaggaagtctgagaagttctggcaccattgtcatatgtttctagcagagcagaatgccagggctgggccatgtctggggaacagcctcaggatagagtagacagcatataagggaactgaggccagaccccaggaagaacaaaaaatatatatttatgcagagagaacaatataaacaagcttctactgctctgatgataaatgtgagatgattcacaggacactaattcatatctactcttaccatcagaaaatataaacactattaaaacaaaatgtttacatagatccaagcttatattgtgaaaatagaacttctcattgttctctacatgggggtgtgtacaacactggtggaccccgcaagcttgctcaggtacaactcaggtacaggatcatttgggaaccctgagcatggcccctgagccaatgtataacatgattggtcaggctggttctgccttgaataacacagattccactttagctgagagaaggtaatatttttttaaattccattttggtttatctacactgttttagaatgtatgggtttctctagatcctctgttacttcaggtgtgacattttatgcacgtcacttgttgcagcccactggtgtccacattctgccatgtgatgtggaggatcctcacctccatgtaggcccatttctccttctcactttacaacataatttacatgcatgaagaactatatcagaccatggagtaatttttgcttcaatcatcaaacacagtttagaaaaactcaagaaggccagtctgtcgtgtttatccatgtttttattatttctatttttcttcattcctgatgttatgtttccttattttatcattttgtttctgaattaagaacttccattagccacacctttaagaaggttgctgtgtccttccttgagtcccaggtccccctggcagcccacagtgtggatctgggatacacagggtgagcacaggctgtaggagttcttgaaattctggcaggggttctgcacttgacctaagaggtaaggcaccagcacttctgaaaccagacagaattggatggaagctgtattttaaggtgattgtctgtatttatgaggattaatcttttggataatctggaaggcctgggggactcactggaaagatatggtaataatttcaataaatatttaagggctataccaagttgaggctggtaggaccagggagaagcagctgcatgctacatattgagatcatctaaagacagcaaattgatgttttacatgaggttgattttgaagagtaaggaggcatatctggtccccagtctcatctctggaaagaactgcaccagacccaatccaccctaattacctgttctctcctgattgtgaagtctatgaaaagaaacacataggtcattttcagaaaatgaagacatggtgttagtagcaaaatctcactgtggtgtgaatgagcatttatgaactgtcaggaaggagcccttcattgctctgttgtcaagaatggcagacactaagagctcagccagggctttgacttaagctccatgtgaataaccttggcctatgctccctggacatgcagttcactgtccgcagagtgtggccagtttgtctgatgggaggaatcacatgcactgtgagtcaccccttgcagcaagaagtccacaaacaggactttttcctggcaatagtaagtgaggtcagctggggtgtggagctgcccaagactggctgcacactccagggatgggagttttagtgccctggagggagcctccacctgtgactgctttagcactgccctgagaaccatggtccacatggcgcctgtgagcagagatgggggaaagaggagacatcactgggctgcagaggtcaacagggttgtggaagtgtcttttattgcaattaagttttctagtcatgaaacctcttcgaggtatagaatcagctctgaaattctcaaagtgttttgatcatagtatttaaggatttatttttttaactgagatttacattactatgtatttgcagtaatgtttttgttaaaagttgtatcgtaatgtatttagccagaacttagtgtctgtgagaaagaaaagatactagaacttcttactaccttctaagatataaagtttaaaattatataatgtaaccagtgacttccctgttttaaaaaatcacatactcaaaaaaataaacttactgtctgtata

SEQ ID NO: 1007 - DNA, 3311 bp, Homo Sapiens
gacccaacaccaggccatgggggctactaagtctggcggagtcaaaggaacgagaaaagacaagttaaaagagaaagtgggaccatgcagccaatgctagtgtggaggctgcaaaggccctgagctctgggatcccacactatttattgatgatcaaacaaagaaacaggcagtgaagatgtgggggttgaaaggaagcggtgtatcaagtgaatgagctacagctgtgacggtttagcattttctttgaaacatacggctacttgagataaagggagtgctagaagcaaggagccagcaagtctagacacattccaaagaccacgaggggttttaatcctagaccctggacgtgttccaagccctgcctcagcttctctcccaacactcagcttttctcccaacactcaacattggccattgagagccccttcagctggttgcagtgtttgataagcaagatctacatcatggaggtgatgacatcagtgccagctccatgcatacccagagcccggagagatttactagtgctagtgagcttggcaccaacaatgtctcagcctttcagtctgatcaagcagcaagtgaaattgaggtcacatcttcagtacttcatgcaaatatacctttggagcccaacccttctgaccatccaaaggcaagcacaatattcctgagaaaatctcaaacagatggtatctactgagcattttactcaacaatacagttcatgttcgacaatattccttgatgacagcatagccagccagcctcatcttacaatgacactaaaatctgtgaccttggcactatattatcatatcaagcaaagcgaaaagaggttttggaggaatattttaagtatgatcctgaacacaaattgatcttcagatttgttcgtactctgtttaaagccatgaggctaacagctgagtttgcaatcgtaagtttgatttacatagaaagacttgtaagttatgctgatatcgacatttgtccaactaactggaagaggattgtcttgggagccattcttcttgcctccaaggtttggagtgatatggctgtgtggaatgaggactactgcaagctctttaagaacattacagttgaagaaatgaatgagttggaaaggcaattcttgaagctaattaattataataacagcattactaacagtgtttatagcagattctacttcgatcttcgcaccttggcacacaacaacggcctgtattcaccagtttatcttcttgacagagaaagagcttggaagctggaggctttttcaaggatggaacaagacaaagttttctacagtgctgccaagaatgggtctctgagtgcagatgatttaattcatcttcagcgtgctaaggccatcctcttctgaaggaagaaatgaggagtaatttaacatctgaacccctcatcaaaaaagacaggaaaatatcacctctcctgctaaagaactagaaaagttggtattttctaaagaagaaacacctcaattcaagttaactcaaggacaactaagattgcacttcgtagtaaagaatgggaccttgtcagggcaacaacacactcttacactcttctgtcctgtttaatgtaaacagagttataaaaaccacttcaaagtgaagactcctgcccacgtacagatatttgcttaatgtgtgggctgatagctgtgaactatgtaaggcttttaaaacaatagtttaactttttagattttaaagataacttttctgtttcttttatgtttttttcttttccccaatattcctgcatatgcatttggaatcagtgcagtatcactgttaaaacatgggagtctaacaactcctaaagccactaggagcagtcccagcattgtcaggtatggaagggctctttcttcctacttttaccatggaagctacagttactggcgatcatcaagcaaaagctgccaattaacatttgccattcgtatcctttgtaagcccttcttattagcagtttagcatgtttgggggtcataaaaagagaaagtattggttattgattatctacttttatgaagctctatggtgtatttcttatgaactataatggttctcatttgctgataaattttcttattaagtaaatgtattcaaagatgttttcatagtgccaagcagcatggtggtccagtggttatataaaaataataaaatacaaggtgtcctgaaagtttcagggcagtttttagctttaatatagtgtgcctgggccctccagaggactgcagcatatgtatacatgctgtaaatctttacaaaatatcatttgaaagtgtaattgtatttcttctttttatttttaatagatgatgcctcactatattgcccaagctacagtgcaatgattaatcagagacacaatcatagcacaccacagcctgaaaatcctggcctcaagcaatgttcccatgtcagcctaccaagtagctgggaccatgggtgtgtaccactgcctctggctttattttgcagaatttgaatgttaaacttttaaccttttgtttcagtcaatatctgctatcttcaagaaggactgaaacaataaattaaaagcttaatactcaggagctaggcatgcttgtagtcccagctactcatgaggcttaaatggaggatcacttgaggcctagccttggaggctgcagtgcactgtgattgtgcctgtaaatagctattgcactccagccttggcaacataatgagacactgtcactttaaaaaatggcaaaactaaataaacgtaaaagaaatacaacaagcttttcaatgatttgtaaatgtttgtagcattgttacttctacaagtatcaaagcttaaaatttcactaagacttttggaattcttgtgtttttataaagtgcccttttctcttgtaaagtagctctttgcaaggcttttatctgcattgatcacctcagattattttccctagatgtgataaagaggaggatccatgttaattcatatgtaacaaattagaaggaattggaccctaatagtagtaggtgatgcaatacattttattatcccacatgttagcctggatgcaggtatcatatttcatgtcctgctatttaaaaagaacttccataaaccttaggaatcctacctcctgaaaaagtatcatttatggaatgcagagcttagagattggagtattgattgcagttttattttcaaaataaatgctacaattgatgtggttttcatttctcatgtttatattaaaagaaaacctagtaaactaattaaaa

SEQ ID NO: 1008 - DNA, 2040 bp, Homo Sapiens
acgcgcgcggggcaacctcgtctcgcctcccggcccgacggagccctcgcctcaccttttccagcagctccgccgccggcccgtcgtcctcctcgcctccggtcccattcgccgccgcagccgcctcggcctgacagtcgcccgtaggggagaactgaggtcgcttgaagcgcttcgtccggctcttgcccatggtgacgtgcgctgggcggacagaccaccgagagaggagggcaacagcaggcggtggaggctgccgcgccgttaacaaggtccgttgctgctgctcagctgggccggctgacggctgcagcacacatgggcaagccgtgcgcaggcgcacggcgcgtcgtctgccgggtcggggttggggcggggcggggtggggggaactggcgcacggagcgcgcaggcgtggaagagggcataggcggggccagcttcggcaaaggggcggagccttgtgggtttaccgggtaagtaggaggttggactagaatagtaacgccgacccgggcgagaggatcacttgaggccagaagttcgagaccatcttgggcaacataggaaaacactccactccctgtcctccccaccaaaaaaattaaaaattatctgggcatagtggcgtgtgtgtgtagtcccagctacttgggacgttgaagccggaggatcacttgaccccaggagtttgaggctgaggtgagccgtgatcctgctactgcactccatcctgggcgacagagcgagaccctgtctcaatcaatcaatcaagcaaccaataagttagtaacaccggctacaaataatcaaatgtgattaagaatacctaacttgcaaggttattgtaagttctgtaaagttcataaagttctgtaaagtgcctaacaccaagcctgatatatagcaggtactcaaaaagcattaaccacgattttattttgtgtccccagcacctcccatagctcctgtcgtagacagagactagttaatgttttggaacgaatgtgtgtctatatttgataaaacagaatcgcttaagaacctaatctccctgccttagtttcctcatcagtgaagtggggacatcgatagtatatacctcatggagttgttacgaagactaaatgtgttcatatgtttaaggtgctaagaacagagactggcagatactaagcactatgtaaatgtttggaaacgtatttaacaaagagattcttttgcagatatttgttgagtactaggtacagtgctgggcattggaataaagcagtaatcaagacagtttggttcctgtcctctctccctgtccttatggaatttacagtccagggagagatctgttgaatatataattatatgaataactttggttataattgtggtaaatactaagcagagggaaaagtacaggagaatcttaggtggtctttataattagacatgtaacgagtgagtactcaatatatgcatagctttgggtcaattttctttttttctttttgtttttgaaacagagtctcactctgctgtccaggctggagtgcaatggtgcgatctcggcttattgtaacctctgccttggagttcaagcagtcctcctgccttagcctcctaagtagctgagattacaggtatgtgccaccatgcccagctattttttttttattattatttttaggagagacggggttttaccacgttggtcaggctggtctcgaactcttgatctcaaatgatctgcctgcctcagcctcccaaagtgctagtattacaggtatgagccaccacgcccaggctcaggtcaacattctactggagaaaatttccattccatggtaaccctactgtcaaagagttgactgtccagtaagggaaattaattactatggcaaattttagagagtaacagaagtgtagctcatgttgcatttgggcctatcaaagatcaatcttgggctgggcactgtggctcacacctgtaatcccaccactttgggaagccaaggtgagcagatcacctgaggtctggagttcaag
